United States Patent Application Publication US 2026/0191916 A1 - sequence listing, part 51

SEQ ID NO: 219 - DNA, 1203844 bp, Thomasclavelia ramosa
  source 1..1203844: mol_type = genomic DNA
cagaatgatcttcaaaatttaaattttcatcaaagaactctttaccaacaactttctttttatcacgggcatcttctactaacttagaaattaaatctttaacttctcgagcattttttatattctttaaatgaatttcacgttcactgtcagctttagtgtacaaaattactgttccagtaccaaagattttttgtgataaatttcttcgtagacataaatcggtaatacgatacaaaagcaattcgtcatagtgagtactaaataggccagtctcttgatataggcgatcattttttatttcatatttagtaaaactaattggaaaccacataaaatgtttacgatcttgccaaataattttattttccatcataagttcctccaattacaacattttatctatgatgattataacagtaaagagtagtcaattctatgattattgaaataatctcattataaataaaaaaataaaacaaattatgcaaataagtttgtatatatcgcgtaattatgctatactcaccaaagtgtctagaaaggtataaagaatgattgaaaacaaatttaatgaattaggattaagtaatgaagtattaaaagcaattgaagatatggggttttctaaaccgtcaaaaattcaagaagaagcaattcctgtattattgacaggagttgatgtaattggtcaagcacaaactggtaccggtaaaactttagcatttgggagcgttttgttgtcaaaaataactccatctcaaagaaagttaccacaagctatcattttgtcaccaacaagggaactagcaatgcaaatccatgaagaaatggaacgtattggtaaatataatggaagtcgaattacttgcgtatacggtggtagtgatatagagcgacaaattcggaccattaaaaaaggaatcgatattatcgtagggacaccagggcgagtaatggatttaatgcgtcgtaatgttttgaaactaaacgacgtaaaattcgtagtattagacgaagcggatgaaatgttgaatatgggctttgttgaagatatcgaaactattttagaaaaagttgatgatgatcgtcaaacaattttattttcagcaacaatgccagcaggaattaaaaagattgctcaaaattatatgcatgataattttgaacatgtagctgtattatcaaaacaaacaacagctacatctgttaaacaattctattacgaagtgaaacaaaaagatcgttttgaagcaatgtgccgtttaattgacgtcgctaatgttcaaacaggaattattttttgtagaacaaaacgtagtgttgatgaagtaactgaacaaatgcagcaggcaaattataatgttgaagcgatgcatggagatttatcacaaaatcatcgtatgaatacattgagaaaatttaaaaaaggaacaattaattttttaattgcaactgatgtagctgctcgtggtattgatgttgaaaatgtaacacatgtaattaattatgaattaccacaagatattgaatcatatgttcatcgaattggtcgtactggtcgagctgataaagaaggacaagcttattcaattattacaccaagagaaaaaggatttttacgtcaaattgagcgtgtaacaaaatcttctattaccaaagcgactattccaactctgcaagaaatttctgaagcaaaaattggaactctggtaagtaaagttgaagatcaaattttggctggtaaccataagaagttcaagcaattggtaaatgaaattgatccaacaatgttagcagactttacggcagcattaatgtatatgacattccaagaacagttaggatatgattataaacgtgatacgattcaggaggcttctgaaggtaaaaggcgtgaacgcggccgtggaaataataaagattatacaagaatttttattactgctggtagtatggatcgtgtcaaagcaccacaaattgttaatttctttgtttctaaagcaggtgtgagaaaagaagatatcggagatattgatatcaaacgaaaatttacatttgttgatattaataagaaggtaatcaataaagttgttgataagtgtaataagcaaaagattaataatcgaaagattgaaatcgaaattgcaaataaaaaataaatatttggtgaaaagattgtgttttaaaaatacaatctttttttgtataaaaatatggtattttaaaagcgcttacacttgaatgaaaaggctaacacgtgtataatatatttatgtattaattctaaggaggattagattgaatgaaaaaatacgtttatatgtttagcgaaggaaacgaaatgatgcgtgaccttctaggtggtaaaggggctaacttggctgcaatggttaatttagggttaccagtaccacaaggatttacagtgactactgaagcatgtaatgaatattatgctgatggtaagatcatcaatgatgaaatgaaaaaacaaattgatgactgcttagaaagattagaaaaattagctgataaaaaacttgggggattagataatccgttattagtttcagttcgttctggagcaaaattttctatgcctggaatgatggatacaattcttaacttaggtttaaatgatgaaactgttgaagttgtagctaaacaaacaggaaatcgtcgttttgcttttgatagttatcgtagatttattcaaatgtactctgatgtagtttgtgaagttgataaagagttatttgaagctaaattaagtgaattaaaaacttcaaagggatatgaaagtgatttagatatcactgcagaagattttgaaaatatcattattcctcaatataaagaaattttcaaaactcaattaggtagagactttccacaagaagctaaagaacaattaatgggagcaattttagctgtattcagatcatggaataatgatcgtgctattatttatcgtaacttaaatggaattcctcatgatttgggaactgctgttaacgtacaacaaatggtatttggtaatatgggtgatgactcaggtactggggtattatttactcgtaatgctgctaatggggataatcatatttatggtgagtatttaattaacgctcaaggtgaagacgttgttgctggtattcgtacaccacaaaaaattgctaaattagaagaagatatgccagaaatctataaacaattagttacaattgttaaaggattagaaaaacattataaagatatgcaagactgtgaatttacagttgagaatggtaaactatatattttacaaactcgaaatggtaaacgtactggtaaagcagcattaaaaattgctgtagatttagtacatgaaggtttaatcaataaatatgaagcaatgacaagagttgaacctgatcaaatctcacaactattacatccgaactttacacctgctgcattagctgctgctgaggtgttgattgaaggattacctgcttcaccaggtgctggtgctggtaaagtttatttaactgctgaaaaagttcatgaacaagctgtagctggtgaaaaagttattttagtaagacacgaaacttctcctgaagatattcaaggtatggttgattgtgaaggtattttaacttctactggaggaatgacgagtcatgcagctgtagttgctcgtggtatgggtaaatgctgtatcgtaggtgcaaaagcattatcgattgattatgatgcaggaacatttacaattgatggaaaaacttatccagaaggaacagaaatttcattagatggtacaagtggtaaagtatatatgggaattttagattctgaagaatctgaattaacaggtgattttgctgaattgatgtcttgggctgatgaaatcaagaaattgcaagttcgtgctaatgctgatagccctcgtgatgcggctgtagctattaaatttggagctgaaggtattggtttatgtcgtacagaacatatgttctttgaaggagatcgtatcgaatatgtaagacaaatgattttatctgatacagtggaagaaagaattaaggcattagatgagttatataaattccaagttgaagacttcagaggaatctatcgtgcgatggttggattaccggtaacagtacgtttattagatccacctcttcatgaatttttaccacatactgatgaagaatatcaagcagttgctgataaacttggaaaaacattagaagaagtgaaaactaagggcgcaactttaaaagaaactaatccaatgttaggacatcgtggttcacgtttagcagtaacgtatccagaaatctataatatgcaagttagagcaattattgatgcagcgattgatgttgaaagagaattaggatgtacaatcgtaccagaaatcatgttaccattgattggtagtgaatctgaaatcgtttatgtgaaagataatgttacaaaagcaattgatgccgcaattatggctaaaaatgcaaaaattgaatataagatcggtacaatgattgaaattccaagagctgctttaacagctgatgaaattgcaaaacatgctgaatttttctcatttggaactaacgatttaactcaaatgacatttggtttctctcgtgatgatgtaggaagtttcttgcctgaatatattaatcgtaaagtaattcaagttgatccattcgtatcgcttgatcaaagtggtgttggtcaattagtagaaatggctgcaaacaaaggtcgcagtgttcgtccaaaaattaaattaggtatttgtggtgaacatggtggagatccagaatcaattaaattctgtcataaaacaggtttaacttatgtatcttgttctccatatcgtgtgttaattgcacgtttagctgctgctcaagctgctgctgaggaaattatcctagaacatactactgataaagtattagttgctgataaatagctgataaacgtctcttaatttaaagagacgtttttttatttgtgtaaagtaggatatttggtataatagatatggtgataaaatgaaaaatattataattgtagcaacaggtggaacaattgcaggaagtggcaaagttggaaaagcaactaattatcaggctggaaaaatcaatattaaggaaataattgactctattccaatgattaatgaagttgctaatttaaaagcaattcagctttttaatgtcgatagtaatgagatgaatgaagaacattggataattttagctaataaaataaatgatttggcttctcaaaaaaatgttgatggtattgtagttactcatggaactgatacattggatgagacagcctattttttaaatcttacaatcaatacatataagccagtcgttttgacaggggcaatgagaccagcgagtgcaactagtgcagatggtccgattaatttatatcaagctgtttgtttggcttcgtgtgatgatgctttgggacatggcgtaatggcagtcttttcaagtacaatttattcagggcgagatatccaaaaaattagtaattttaaaactgatgcatttgatcaaaaagattttggatgtttgggttatatgaatgatgataaagttatgatgttttcaagaacttttaaaaaacatacattgcaatcagtttttagtgaaaagccaattactgaattgcctccggtagggattgtctattactatgctggtgctaaacctgatattttgacgatgatggctcagaatcatcgagggattgtgataattggcagcggtagtggtaattatagtcaagcatggctgaatgaaattgaaacactaggtgctcaaggaatcatttttgttagagcgtctcgggttaatcagggaattgtatatgagagtgatgtttttgatcctcataatgtctgtataccgtctaatactttgtcaggacaaaaagctagagtgcttctaatgcttgctttaagtgttactcagaatacaaaagaaattaaaagaatttttaatgaatattaaagggggcacatgtacgtggaacgaatcaaacttaatttagatagtattgcaatgatgctgttttgtgctcgattaaaagcgtataaagaggtcccgctttctaatgaggaatggttgttaattgagcggattataaaaaagaaggggttaaaaggacctgctagtttgctgtcgatgaatcagacagaacttgaagaaattttagaaataaatgaatttattgcttataaaatggcacgaagaattgaaacgatgaatatttttttaagtgttcttaataatctggagggaaatggaattaatgttactacaaaatatgaagataatttccctaaattgttaactaaacacctaaagaaaagggctccattatatgtgttttattgtggtaatattgaattagttggagaaggaatttctttgatgggtcttaataaggttactaaaaaagatcgcgcctataccaaaagattggtagataaagcaattgaagataatctaatttacatttccaatgatgctaaaggaattgatgatgttgctttgcattacgcactttatcatggttgtcattgtattagttttgtttgtgagcgacttggtgctaaaagcaaagactatactagatatattaaatccggacaattagtgatgctgagtgctgaggatccaaactgctattttgatgtaactaatgcaattgagcgtaatagctatgtatgtgcattgtcaaaatatcaaattattgtttcaagtagtattaataatggcgcaacatggtttacttcgttgcaaaatttacacaataaatggactacacctttagctgttgaagggttatatttaggaaatgatcggttacttgatatgggagtgacaccaatatatataaaagatgtattgtctgattattcgttcgatatgatttatgatagaaacaaaaaaattgttgaagatgcagaagtcaatattgatcagatgtcaatatttgaatttataggagaatagaatgaattttgattataaaaaatatccagtgacagccggggtgattggaatatgtattttagtttattgttatacaaccgttaaatacggttttgaaatgaatgcttatcaaggaatcagagcaggtggatttaatccaattttggttttggcaggaaatcaatattggcgattaattagtgcaaactttattcattttggaattatgcatattttttgtaactgttattcattagttaatctaggctcagttatggaatatttgttgggaatgaagcgttatttgattattttgattgcttctgcccttgcaactacgattttaccaacagttttttatattttgactggaaatggtgctagtagtattatgggaggtatttctggagctatttttggattgatgggagctttattagcattggcttggaaatttaaagatgtttatgcatatttattcaagcaaatattgtcaagtgttctattgatgctgctgatttctatattggtgccttcgatttctttatctggacatatttcaggtatgattggtggttttattgcaactttactaattatcaaatttatgcctttacgcatttggaaaaagaaaaaaccggaaaattatcataatcttgtcaattaataatcagatatagtaaaatataaacatatagaggagagtacaatgaaacaaaaagtaagaaaagcaattattccagcggctggattaggaacaagatttttaccagcaactaaagcactagcaaaggagatgttgccaattgttgataccccaacaattcaatatattatccaagaagcagtggatagtggaattgaagaaattttaattattactaattcaaataaacatgcgatggaaaatcattttgataagtcgtatgaattagaagcgcgtttaacagaatcaggtaaaatggaacaagttaaaatgatacaagatattgctgatatggcaaatatttattatattcgtcaaaaagagccaaagggattaggtcatgcggtattatgtgcaaaatcatttattggtgatgagccatttgcagtattattaggtgatgatattgttgtaaatgatggtggtgagccagcattaaagcaattaatagatgcgtatataaataaagaagcatcagttgttggggtacagacagttgaacataaagatgtttgtaaatatggaattgtcagtccgtcacattcgcatcctcgtgaaaatggtgggcgtttagttaagttaaataatatggtggaaaagccggcagttgaagaagctcctagcgatatggcagtattaggaagatatgttttgacaccaaaagtatttgaattgctagaaactcaaggaaaaggtgctggtggagaaatccagttaacagatgctatcaaacgtttaatggatattcaagcggtctatgcgtatgactttgaagggattcgttatgatgttggtgataagtttggttttattaaggcaacgattgattttgcattaaagcgcgaagatttaaaagaaaaggttcaagcatatataaattcacttgtaaaggatgttaaatgatgagttttcaagagaaatatgaagagtataaacaaagaaaagaagcgcaagcgttttttaatcaaaataatgatcaaaaagtatatgggaaagattatttaatagctattttagttggatttggttcaacgatcgttatgggatgtattttaacctggattatttctaaaataggttttaatttttcatactttactattttaattggaatttttgaagctcaggcaataaaaaaagtattgaataaaagtggtcaacaattagccattattgctgcagttacttttgttttaggaattgtcgtggcacaagcaatttttataagtataacgctacctttttttaatgtcagcatgctagttgaaacattcaaatattgtttccaaaatatgataacaggtgatgtgttaagtacaattatctatttatttggtgcgattgcggcatatatggcattaaaagattaaatatattaatttaaaagaatataattggctgatcggttttagtgatcagcttttttgttatattatttttaataaagattgatggattcaaggtaaatggattgttaaataaaaacattctttttatttaaaatgaaaaaataatgcctttctatatttgtgagggtcttttagtaattataactagcaatacaaaaggctacgtagtataataatggtatgcaaaaggaggatttttaaaaatggctaaaaagtttttatcaatggatggtaatactgctgcagcgcacgttgcgtatgcgtttactgaagtagcaagtatttatccaattacaccttcatctccaatggctgaaaatgcggaagcatggtctgcccaaggtaaaaaaaatatctttggttcacctgttaatgtaattgaaatgcaatcagaagccggagctgctggtgctgtccatggggcgttacaaggtggtgcacttgcaactacttttactgcgtctcaaggtttattattgatgattcctaacttatacaagattgctggggaattattacctggtgtattccatgtatcagcaagagcacttgcaacaagagcattaaatatttttggtgatcatcaagatatttatgcttgtcgccaagttggaatgccaatgatttgttcacactcagttcaagaagtaatggatttaggaggaattgcacatttaacggcaattaaatcatctgttcctgtaatgcacttctttgatgggtttagaacatctcatgaaattcaaaaagtagaagtaatggattatgatgtattagaaagtcttttagataaagaggctcttgctaaatacaagaaaaatgcaatgaatccacacactaacccaattgagcgcggtggggctgaaaatgatgatatttatttccaaggtcgtgaagctcaaaacaagcattatgatgcagtagtagaagtagttgctgattatatgaaaaagatttctgaaattaccggtagagaatatgctccatttacatattatggggcacctgatgcagcaagagtaatcgttgcaatgggatcagtaacagaaacaattaaagaaacaattgatgaaatgaaccgtcgcggtgatcgcgtaggtttaattaaagtacatctatatcgtcctttctctgccaaatacttattaaaagtattacctaatacagtggaaaaagtagctgttctagatcgtactaaagaaatgggtgctactggagagcctttatacttagatgttgttagtgtccttaaagacgttaaacatgtaagagcaattgttggtggacgttatggtatgggttctaaagatactactcctcgtcaaatcaaagcagtatatgatcatttattagaggatgctccatttacttcatttacaattggtattaatgatgatgtaactaatctatcattaaaagaggatcctgaatttaatgttgatgctgattatacagcatgtctattttatggtttaggttcagatggtactgtttcagctaataaatcttcaataaaaatcattggggatcatactgatttatattcacaagcttattttgcttatgattctaaaaaagctggaggggcaacacgctctaatttacgctttgggaatactccaatcagagctacttattatgtaaataatgcggattttatttcttgttcattagacaactatgtaattaaatatgatatgttaaaaaatcttaaagatggtggaacattcttattaaatacagagttctcaaaagaagaaattattgattatttaccaaatcgagtaaaaaaacaattagcagataaaaaggctaaattctatataattaatgccaataaaattgctggtgaaattggtatgggaagaagaactaatacaattcttcaatctgcattctttgcattaaatccccaaatcttaccaattgaaaaagctgttgaatatatgaaagaaatggcaaagaaaacatatagtaaaaaaggtgatgctattgtccaacttaactacaaagcaattgatgcaggtaaagacgcaattgaagaagtagctgttgataattcttggtctgatttaacagtaactgcaactagaagtactactggagatgaacattttgatgaatttgtttcagtaatcaatagtttagatggttatgatttacctgtttctgctttcatggataaattagatggttcaatgaaatcaggagtggcaatcaaagaaaagcgtgcaattgcaactgaagttcctcgttggaataaagataactgtattcaatgtaataactgtgtaatggtttgccctcatgcaacgatcagagcgttcttacttgatgaagaagaaatggctaatttaccagaaaacattggtgatgatgttttagttccaatgggtaaagatatgggtggattagtatatcgtatccaagtttcaccggataactgtgttggatgtggtttatgtgttactgaatgtccaggtaagaaaggtgaaaaagctcttgaaatggttagtgtgaaagatgaattagtacatgctccattagctgattacatgtatgctaatgttaaatatcgtgatgataagtatccattaactacagctaaaggtgttggtttcatgagaccgtattttgaagtttcaggtgcttgtggtggatgtggtgaaacaccatactatcgtttggcttcacaattatttggtaaggatatgatgattgctaatgctactggatgtagttcaatttatagtggttctactccttctacaccttgtgcgattgatggaaatggtcaaggaccagcatgggctaactcattattcgaagataatgctgaatttggtttcggaatgaaattagctgaaaattataaagttgggcatctattacgtattattgaagaaaataaagatgcttgtgaaccgggactgaaggctttattggaagagtatgttgaaatcaatggtgatcgcgctaaagaaagagagcttgtgcctcaaatcatgactgcggttaaagcttcaagcaacgaagcaattaaagaattgttaaatcatgaaggagatatggtaagtaaatctcaatggatcattggtggtgatggatgggcttatgatatcggctatggtggattagatcatgttattgcaagtaaccaaaatgttaatattttagtacttgatactgaagtatattctaatacaggcggacaatcttctaaatcatctcaagctggatcaatcgccaaatttactgctgggggtaaatcagctgctaaaaaagatttagcacaaatcgctatggcatatggacatgtttatgttgctcaagttgctatgggagcaaatcctgtacaaacaattaaagcattcaaagaagctgaagcttataatggaccttctttaatcattgcttactctccatgtatggaacatggtattaaaggtggtcttgcaaatcatcaaagacaacaaaaagatgctgtatcctgtggatacttcaacttattgagatatgatcctcgtcttgaagatgcaggaaagaatcctttgcaagttgattctaaagcaccaggctttgataaatttaaagatttcttgttatctgaaaaccgttttgcacaattgttaaaggttaatccagaacatgcggaggcattaatggagaaatgtttagctgatgctaaaaaacgtcgtttaagattagatagaatggcataaaaagtttaaatcagaggaaaaatcctctgattttttcttattcgactgcaaatatagttgattattacactgttttttggaaacttaataaaaaaataaaaaaaatgtataaaattctttacaagagcaaatattagtgatagaataatcatgcactcgagataagagtggagatcattgaaaactaaacagaattaagaaacacacgtcaatatccagaaggataaaaaagaaaaaagagctaaacaaacgaagagttgtttaaataaacaatggagagtttgatcctggctcaggatgaacgctggcggcgtgcctaatacatgcaagtcgaacgcgagcacttgtgctcgagtggcgaacgggtgagtaatacataagtaacctgccctagacagggggataactattggaaacgatagctaagaccgcataggtacggacactgcatggtgaccgtattaaaagtgcctcaaagcactggtagaggatggacttatggcgcattagctggttggcggggtaacggcccaccaaggcgacgatgcgtagccgacctgagagggtgaccggccacactgggactgagacacggcccagactcctacgggaggcagcagtagggaattttcggcaatgggggaaaccctgaccgagcaacgccgcgtgaaggaagaaggttttcggattgtaaacttctgttataaaggaagaacggcggctacaggaaatggtagccgagtgacggtactttattagaaagccacggctaactacgtgccagcagccgcggtaatacgtaggtggcaagcgttatccggaattattgggcgtaaagagggagcaggcggcagcaagggtctgtggtgaaagcctgaagcttaacttcagtaagccatagaaaccaggcagctagagtgcaggagaggatcgtggaattccatgtgtagcggtgaaatgcgtagatatatggaggaacaccagtggcgaaggcgacgatctggcctgcaactgacgctcagtcccgaaagcgtggggagcaaataggattagataccctagtagtccacgccgtaaacgatgagtactaagtgttggatgtcaaagttcagtgctgcagttaacgcaataagtactccgcctgagtagtacgttcgcaagaatgaaactcaaaggaattgacgggggcccgcacaagcggtggagcatgtggtttaattcgaagcaacgcgaagaaccttaccaggtcttgacatactcataaaggctccagagatggagagatagctatatgagatacaggtggtgcatggttgtcgtcagctcgtgtcgtgagatgttgggttaagtcccgcaacgagcgcaacccttatcgttagttaccatcattaagttggggactctagcgagactgccagtgacaagctggaggaaggcggggatgacgtcaaatcatcatgccccttatgacctgggctacacacgtgctacaatggatggtgcagagggaagcgaagccgcgaggtgaagcaaaacccataaaaccattctcagttcggattgtagtctgcaactcgactacatgaagttggaatcgctagtaatcgcgaatcagcatgtcgcggtgaatacgttctcgggccttgtacacaccgcccgtcacaccacgagagttgataacacccgaagccggtggcctaaccgcaaggaaggagctgtctaaggtgggattgatgattggggtgaagtcgtaacaaggtatccctacgggaacgtggggatggatcacctcctttctaaggagaaacgcatgatcgaagatgatgcacaagagaagtgatgtttcgaagatactgtttagttttgagtgatactcaggtatgactcagagatcattgaaaactggataatagaaaataaattgcgatagaaatagaaaatgagatcgaaatagtaattgttattattgaggtctttctagaaaagtcgaaaactaagaattttcatcactaaaaaacataaatcgaaacggatggatggattttagtaaatagttgaaaatagtaatcaagcaaacaccaaaataggtaaagtaagaaagagcgtatggcggatgcctaggcacagagaggcgaagaaggacgcagcaaacagcgaaatgcgacggttagcagtaagcatgcaacgatccgtcgatgtccgaatgggggaacccacctggagtagagaccaggtatcctgaagtgaataaatagcttcagagaggcgagactcagggaactgaaacatctaagtacctgaaggaagagaaaataaacgaatgattccctaagtagcggcgagcgaaaggggaagagcccaaaccgatcttaggatcggggttgtaggactgtcggcaaagagcaagaaatcattataggcgaacggaatgggaagtccggcgaaacagggtgacagccccgtagccgaaatagtgaagaagcacgagacagcacctgagtacggcgggacacgaggaatcctgtcggaatccaccaggaccatctggtaaggctaaatactcctctgtgaccgatagtgaaccagtaccgtgagggaaaggtgaaaagaaccccgggaggggagtgaaatagaacctgaaaccatatgcttacaagaagttagagcccgttaaagggtgatagcgtgccttttgtagaatgaaccggcgagttacgatatggagcgaggttaagcaggatatgcggagccgaagcgaaagcgagtcttaacagggcgaaagttgcatgtcgtagacccgaaaccgagtgatctagccatgaccaggttgaagttggggtaaaacccgatggaggaccgaaccgacccccgttgaaacgttggcggatgagttgtggctaggggtgaaattccaatcgaactcggagatagctggttctccccgaaatagctttagggctagcgtcgaggtaaagtcgtgtgaaggtagagcactgaatatgtgatggccccatctcggggtactgaacataatcaaactccgaatgtcacaaagatatactcggcagtcagacagtgggtgataaggtccattgtcaaaagggaaacagcccagaccatcagctaaggtcccaaaatatatactaagtggaaaaggatgtggagatgtccagacaactaggaggttggctcagaagcagccatcctttaaagagtgcgtaacagctcactagtcgaatgactctgcgccgataatttaccggggctaagtatattaccgaagctatggatttacgcgtaagcgtgagtggtaggggagcgttctatgtgcggagaagcggtaccgtaaggagccgtggagcgcatagaagagagaatgccggtgtgagtagcgaaacgtgggtgagaatcccacgcaccgaaaacccaaggtttccagaggaaggttcgtccgctctgggtaagtcgggacctaaggcgaggccgagaggcgtagtcgatggacaacaggtagagattcctgtacttacggtatgaatgatggagtgacggagaaggctagcggatcctgctgatggaaatgcaggtgcaagcgaggtagccgacagccaggcaaatccggctgtcgaaaggcaaaggcgtgaggcgtatggaaagctgcggcaagtacagaagtccgtgaagccagcttccaagaaaagcttctagtgataatcatacagtaacccgtaccgaaaatggacacacatgggtgaggagagaatcctaaggtgagcgagagaactatagctaaggaactctgcaaaatgactccgtaacttagggataaggagtgctcatagagatatgagccgcagtgaaacggcccaagcgactgtttaccaaaaacacagctctatgctaagtcgaaagacgacgtatatggggtgacgcctgcccggtgctggaaggttaagaggatgtgtcagcgcaagcgaagcattgaattgaagccccagtaaacggcggccgtaactataacggtcctaaggtagcgaaattccttgtcaggtaagttctgacccgcacgaaaggcgtaacgatttgggcgctgtctcagctgtagactcggtgaagtcttagtacctgtgaagatgcaggttacccgcgactagacggaaagaccccatggagctttactgtagcttgatattggactttgatgcaagatgtacaggataggtaggagactgagagacatgcacgccagtgtgtgaggagtcaatgttgggatactactcttcttgtattggagttctaaccggatgccatggaactggcaacgggacagtgtcaggtgggcagtttgactggggcggtcgcctcccaaagagtaacggaggcgcccaaagataccctcagcttggatggaaatcaagcgcagagtgcaaaggcataagggtgtttgactgcgagacctacaagtcgagcagggacgaaagtcgggcttagtgatccggcggtgctgaatggaaaggccgtcgctcaacggataaaagctaccctggggataacaggctgatctcccccaagagttcacatcgacggggaggtttggcacctcgatgtcggctcatcgcatcctggagctgaagtcggttccaagggttgggctgttcgcccattaaagcggtacgcgagctgggttcagaacgtcgtgagacagttcggtccctatctgtcgtgggcgtaggaagtttgagaagatctgtcctcagtacgagaggaccgggatggacatatcaatggtgcaccagttgtcacgccagtggcacagctgggtagctaaatatggaagggataaacgctgaaggcatctaagtgtgaaacccacttcaagatgagacttcccattacgcaagtaagtaagaccccttaaagacgataaggttgataggtcaggagtgtaagcatggcgacatgttcagcggactgatactaataggtcgaggacttaacctagagaaaaagggttaaggcttgaaactgaaagaagacaaagtggaagacaaaagacgcaagaaaactattatctagttttgagtgattctcgaaaggaattgcttagaaaagaagatctggtagcgatagcatgatggacacacctgttcccataccgaacacagaagttaagcatcataacggcgaagatagtaccaaggtgcgacaatagcaagctgccggttctttttttatttacggatacctctgcgtatccttttttctttgttctaaaccgaagtatgccttacttataatcctttaaattaggactactttgtagtataatagatatggtgataaaatgaaaattaaattatattttggacaagaagatgctatcaaaaaatcaggaattggtcgtgcttttgtccatcaaaaaaaagcattagaattatcaggaatcccttatactacagataaggatgatttggattatgatattctccacattaatactgtatggcctgatagttttaagataataaatcaagcacgaaagtataataaaaagattgtatatcatgctcatagcacagaagaagattttaaaaattcttttatgttttctaatactgtttcaggggtttataaaaaatggctgatcagtatgtatacaaaaggtgattatattgtaactccgactccttattcaaagcggattttagaatcttatggaattacacttccaattaaagcagtttcgaatggtgttgatttgacacagtttaatcctagtcaagaacaaattgaatcgtttattcagcaatacaaaattgattctaaagatgttgttattatttcggtaggttggctatttgaaagaaaaggatttgatacttttgtatcggtggcaaagaaattgcctgagtataaatttatgtggtttggtgatattaaattatcacgtcctacaaaaaagattaaagatttactagatgatttacctcaaaatgttattttaccaggctatgttagcggtgatataattaaaggggcttatggaagaagtaatatattctttttcccatcaagagaagaaactgagggaatagttgtattggaagctttggcaagtaaatgtaatgttttactgcgtgatattcctgttttttcagattggttagaaaatggcgtgaactgttacaaaggtaaccacacagatgattttgttgaaatcattaaaaagatgattaacggagaatatccttcattagttgagcaaggctataaagtagctaaagagagagaactatcaaagatagggaaagaattattagaggtgtatgaagaaacgctgaacctctaatatgaggaaagcttatggataagaaatctaataaaaaatatttccttaatattattttaattcttgttttaggggcaactgtaatttattttacaatgaaagatgatttacatgcttctttaagagcattaacaacggcctcgcctttatggattgttatttcctttgcattaatgtctatatattttttattagatggaattaatctatatacttttggtaagttatataaaaaggattatagttataagcaagggtttgtaaattcgatttcaggaactttttttaatggggttacccccttttctagtgggggtcaatttgcacaagtctatatttttaataagcagggaattgccccaactaactctgctagtattttattgatggcttttattgtttaccagtcagtactagttttatttactgcagtagtgatgattttccgttatcaggcttatagttcaatgtattcagaatttttttcattagcaattttaggcttcttgattaatttctttgttattactggactatttttaggtgctaaatcaaagcgattacaagattttatttgtaataatattgtaaaagcattaagtaaaataagaattgtaaaaaactatgaagatacttctattaagattgcacgttcacttgaaaactttagaacagagttaaacgtgttattaaaaaataagaatgtattgataaaatcatcattaattaatttgtttaaattattaattatgtatagtattcccttctttgcagcaaaagcattaaaccttaatgtttcatttatccaaatattcgattttattggtatttgttcatttgtttatatgattactgcctttgttccgattcctggagcaagtggcgggagcgaaggagtttattatatgttatttagccctattttaggggctgttggtacgccaacaacattattagtatggcgctttgtaacctactatttaggactaattattggtggtatcatttttgcaactaatcgagaaataaatagatcggagtaaagtaatgagaatagcaattttttcagatacatatatccctgatattaatggggtagcgacatcaactaaaatattgaaagatgaattagtaaaacatggacatgatgtagttgttgttactagcgagttacctagtgatagtgattatatggatgatcctcatgataatatcttaagagttcctggattggaaatacaagccctgtatggttaccgggcttgtaatatttattccttcaaaggaatgcgtgaaattaagggaatgaacattgaagttatccacgttcaaactgaatttggggtaggaatatttggaagaatcgtaggagaaactcttaatattcctgttgtctatacgtatcatacgatgtgggcagattattctcattatgttaatcctgtaaattctggagctattgatggtttgatcaaaaaggcaattacacgtattagtaaattttatggtgataaaagtactgaattaatcgtaccttctttaaagactaaagaagcattagaattatatggtttaaataaagacgtccatattattcctacaggattagaactagaaaaatttgatcctaaaaataaaaatactgaattgattgagcaaattaaagacaaatatggaattaaagatcagtttattgtaacttttttaggacgaattgcgaaagaaaaaagtattgaagtattaattgatgcaatgaaggaagttattaaagaaaatgataatgtactttgcttgattgtcggtggaggaccacagttagaggaattgaaagaattagtaaaagatgatcatatcagcaattatgtgatttttaccggccctaagcctagtaatgaggtaccaagttattatcatttatcaaatgtatttgtttctgcttcaataactgaaactcaaggattgacttatattgaggcgatggcaagtggaatacctgctgttgcacgctatgataaaaatttggaggatgttatcgatgacggtgtaaatgggtacttttttaaagaaacatcggaactagtggaaatcctactaaaattaattaatcataattattctaaaatggcagaagccgcatacttaagtgcaatgaagtttagtagtgaagtattttatgaaaaggtaattgctgtttatcagcaagcaattaattcgaaacactattcatatacggtcaagtcgatatatccggttaaaagagggataaatgaagttgtttttctatttgatgaaagtgagattattgttgaggtaaatgataaattaattaaagcttatcaattagagccaaataaagttattgataaagagttatttgatgttttaaaagattttgaacaagtttctcgggcctataataaagcgttaaaattactcacagtaaaagattatacttataatcaaatgaaaaagaagttaatggatagtggtgattatgatgatacacagttagatgcaacgctagagttacttcaagagaagaatttaataaatgatgaagcatataccttaaattatttaaaacgctgtacacgacttggaattggcttaaataaagctatttataatttacggagttatggaattgatagtcaaattattgatcgatgtttagaagagattgatgatgatgacgatgagtataatgctgccaccacattaattgaatccatttatagtcgtaatactagtttttcttataaagcaatggtgaagaaaattcgagataaactttatataaaaggctttacttctgaaacaattgaacgagcacttagtgattttgattttgagtttgatgatcagcaagaacaagaagctttggaaaaagaattctcaagacaaaagaaaaagtattcaaaaagatatcaaggtactcatttaaaagaaaaaatcattgatactcttttaagaaaaggttacaattatgagcatattaaagaattattaaatagagaaggagccttggatgatgaataaaataaatgaattaaaacctggtgatgaaggcgtagtaattgaggcactgattaaccgtgttgttgttggaaaaacaaatggggccaatcgttctacctatcttagtattactttacaagatgctactgggacaatcgatgctaaattgtggaatgcaactaatgagcaagtagaaaagttagttatgggttgtgttgtacaagtaaaaggtgatgtaatcaaatataatgaagatcgccaaatgaagataatcaaaattgttgttgcttcaactgaacctcaagaacaagttaaatttctaaaaagtgcgccacaaacaggagaagagcttgtaaaggagatttatacttttattgagcgaattaacaatcttaagttaaatcagttagttaaagcattattcaacgaacatgttgaaaaattaacaatttatcctgctgctagcaaaaatcatcatgagtatgtatctggattagcatatcatacttgcagcatgttaaggatagctgatgctttggctcgattatatccatcattaaatagagatttgttatttgcgggaattacattacatgatttaggtaaaacagtagaactaagtggtccagttgtacctgaatatacaatcgagggtaaattattgggtcatatatcaatctctcaggcaatgatcaaagaaatggctgataaaatgaatattgagggtgaagaagttacgctgttacaacatataattttatctcatcatggaaaaaacgaatttggttcaccaatactgccacaaatcaaagaagcagaggtaatttatttaattgataatatggatgctcggatcaatatgctagataaagctttagagacagtagaaccaggtggtttttcaaaacgagtttttgctttagaaaatagagccttttataaaccaaaaatgaattaaattaagattgtaaaacttattaaaaagagtaattctatcatttgacagaattactctttttctgtgtgccgagcatggcatacatttagctggtgaaagtcccaccacgggtatttaccgctaagagtagtgaaccacaaaccattagtagtgatgctatgggtgatggaattggtgtagcgaaatattcgagattacgaaaagaaatttgatgaggctgaatgggagataaggttgcagaacaaaccaagacagtaaatcaaaaacctgtgaagataagaaaagacgtatgccttacctcgggagaccttgtggacgatgaagtccagtaaactgttaaaaacagtaatgataccatcgatagaaaaagatttatcacaagaagtctgatgaagtcatagtagtcagaaatgatgaaggactgaaacgtttatagagtgcaaatcactataagcaatatttggatagttcgaaagtgagggtagcctagaactgggaaacgtaatcctagatggtaaaagtaaagagaatttgaaaatgactatcgaaaaggtcaaacaaaataaaggagtacctggaatagacaaaatgactgtgcaagaggtggaagaagccaaaggcaatatatagaaatctaatgaaattaaacaaggcatgtaaatgtagatttagtgaagatgacatttataagtgtgcaaacacaaggttaggctggtataggagaagtggaatgaatatagtcaattttataatatcgctaaaagttctaagcataaagaaaggtgatagaccaggtttagtctatcacctagattattatcttaagagtgatataaatgtagagccgtatacgagacacgtacgtacggttcaatgggagaataaattatcaaatttattcctttaccctattaatgaaatagaagtataaataacaatttaattatttaaatttaagaatttttacgatcactttaaaaccaattagcagtttcagaagtatgataatgtatttgcaattcggaaatgtgataacttaacacattattattaaaaagtggttcatgtttataaaattcttgtatttcaatttcatttctagattttattacagttattgaagaactcatatcgctttttaatgacgaaaagagtactttccccgctttcattaaaagatttgtatatttttgatgctcttgcatcatttcatttgtcattcgttcaggatgagtaacgataccttcgattaaaaaatacttcatagttttaacttcctccaaagtcaataattttaaataaattataacatttagattaagtatcgtcatttttttaacttttataattacagataggataatcaatttaaaatgattttgataaaaaaacgctaaataagtaatatacaagagtaaattactttaatttagcgaaaatatctaagttttataagctgtttattttattaaaaatattatctaaatcaacttcttgactacgatcagtaaagtcgattttgatttgatctgtttcattatatcttggaataatatggatatgaaaatgcataacagtttgaccagccacttcatttgcatttgtaagcacattcgcgccttttgcgtctaaattagtgattatttggttagtaagcttttttgttactttgattagatggctcaaaacttctttatcaacatctaaaatattttgatagtgtgttttaggaacaactaatgtatgtccgttagttgtttgactcaaatctaaaaaagctagacataaatcatcttcatatacaattttaccaggtatttctttattagcgattttacaaaagatacaattctccatttctataagtcctccataatattattctaacatagaaaaaagataaggggaaaccccttatccgaaataatcttcatttgattctttaatttcatctttgattgctgattcgtatacatcaaaattgtatttctttaaataatatgtttccatttttgtagacatatcactaacagaagctaaattagtaataatttcatcttttagatcttttttatctgtattgtaaacataaactacagcatatttagattcagatgtcttaatcactttattataaataccatctttagtaaatttatctaattttttaataatttttgagtcgacactgcttgttttagtagtgaccataccagcatcagtaccattgttttcagtcattaaagtgtcaaaatcactgccatctttaactttatcaattaaacttaaggcagctgattcagtgtctaaagtaataatttttaaatatttaactttgtattctttaaccaggtcatcatagttatctttaatatatttttctttaagcatggtttgttttactcctaaagttaaaacaccatcgatatattcttgttcagtttcataaccatattgtttagcatattcttctaatgaagtagttaagttttcagtaaaacttgcaaccttttcattaattctagtttgcactgcatccttatctgtcagttcttgatcagcaatataagttaaagctaatgaaagaacttcagaacttccatattcttttagtaaataatggtaaacatcatttttactaattttaacatcatcagcagttgcaatagtcttatctccatcttttatttctgaagtataagtagttgcactagaagaactacatccgaccaaaagagttgcaactattgctaaaggaaatatttttttcttcattagtttgttcctcctcggctagtttcgcgttcttttaaagcttcatcaattacattattaattattttttcagtatttttatcatcgtatttaacattataagattgataaacaatatagctcatatacttatcatatgcaatcaatggagtatcaatagataaatctttttttatttctttttttatactatctttatcagtactagtaacttttacaaaataatatccatcagtaccttttatggcttcactagtttcaccactggcaagtgctaatattttagtttcaacatcactaccaaatgtttgtgaaagaccacttgtagtatctacaatacctaattttcctttattcttgttagtgtttgtatcatcagagtaatctttggcgatatctccaaaacttttacttgagcttaataaagcagtgacttcactcaattttgctgtttcatcagctgttggattttcaacatcagtcattgaaactttaataagactagcttcacgtggacttgcttgagtgtaataatcatcgaaaacttcatcaaagttcttttcaacgtaagctaataaaaagttgcatctttgatagactctcaccatgttttcacgatattcatcaagtgaattaaatccacttgaacttaacgctgtttgtaattgagtttcagcattatcgccatattgattttcatagtaagtttggatttgatcaactgtttcattagcatcagtttccatatcctcatcgattgggaatttttgatccattaattgttgaagcacggcattaaagtatgaactttttccactggcagtagatattacatcgttaaaaatatcatccgcaaaaatatttttatcttttttcccactgtttaaagaagcaactacatatttcccatcttctttaactgttttcgagctgttttgacaaccagttaataagaaactagtcacgactagtgccgcagcacatttacctaatttcatatctttcctccttatctttccataacgttacaattatactatttatcgcatctaatttcaataaattaggcaaaaacacattgccaattgttattttaacataatttataatatgtaggtggtaggaggggatttgatgaataactgtaaatgcactaatgtaaacatctatgtcttgtttattattctagttattgtaggtatctattgtatgtaataaaaaggaggcgattacaatggcgtgccaagataattcttttacattgatcttagttttattcattttattagtaatcatttgtaatatgtgctaattaaaaaaggatgtcgtcaagacatccttttaaatataaaaaactattgcaataaaatgtaagatagaagctattgaaataaatatatgccagattacatggttgtagggtatttttttatttgcataaaagtatgctccgattgaatacattaaaccaccgataacaattagccagagaaaaacagcactagaattttgaatgattgaaggcataaataggatggctgtccatcccataactagatagatagttagcgaaagctttggtaaactttttattgaaatagatttatataaaattcctactattaccattgcccattgaataacaaggatgatgattccctgatatcctttaattaaacacagagcaactggggtataacttccagcgattgcaaaatatataaagatatgatcaaggattctgaatacctgtttatgaggactgtcatgatccatagcatgatatagagttgaaacaagaaacattaaaaaaatgcaaattgtaaaaacactaactccaaaagattggataggaccacctttaacatatgcatatacagcacaagctgggattagaagtaacatgataaatgccataattccatgagttatacaattaaataactcttctttaaaatatggcggaaagattctttttattttttttgtaattttattattcactttttccaattttatcacccagtacatactataatataaattacttttaaattcaaacaaaaatgatacgctgctgcgtatcattccataagcttttcattttgatgattttctttataaacttgaaaagttattttagcacttactaatagtggcatagcgattaccattccccaaataccgaagagagaagaaccagagagaatcccaaaaagtacccacattatactcaaatcaattctagatgaatagatacgtggagtaatcacatatgacataatcgtcgattgaatgaaaatcaaaataaataaaataacaattgtagtagttcccattcctaacgaagtaattaatcctaaacaattcgcaacgattgggccaacatatggaataatggagctggctcctgaaacaaacccaagaattaaccagttaggatgaccaattgctagatacatcagcattgttgtaattgcttgagcgattgctccaataaagaaagctttaacatattgtactaaagaagaatcaatttcacgtaaatagattggcaatgttttatcaatacgatatgtaatattacgaatatgactacggatatttttaaaattactagacatataaattgctagaatgatgtagattaaaaaattagtgacattgatcataacttgatttaaaacatctatagttgtatctaaaacaactgaatctttaaagaaagcattgacaatattctgaatatggcgcattaaagaagaaatatcataattgaaattttccttaacaaacacaccaatttcaccaagtcctgagtaaaaagccgggaacatttcagagatactttcataaatcattggtacagctaaagaaattaataaagttaaaatagcaaaagcagctaagtagaccattgttacggcaatgcttcgtttagtaacatacttttcaatataatttatcagtggatttaaaacaaaggcaattgtaaatccgacaataaatggtttagaaaccagccagatcgctgataacaccccataccataaatcaccagtggcaataattaatagtaatattactaaaacgatcatcacatttaataaagtatgggtgattttttttgatgaaataattttaaataatgcttttagaaattccatttttacacccccattacatataaatataccacaatttactaataatataaattgaattgaatttctattttagaaaaatcaaaaatagttaaaatgtataaagttttataattttcatctaaaaaaagcaattggatgttatgattagaatattataatagagcaaatctcttgataattatcgataatttggtcacaatgtggttataatataaattgtgctagattttgattggaaaatagtaaaaatttttgctataatttatcattttatttgttttttgataacttatctagtagaattagtaaggatagaaaggggcttaattatgtcaactttaaaaatagaaaatttgcatgtcagtattggagaaaaagaaatcttaaaaggtatcgatcttgttgttaatactggtgaaacccatgcgattatggggccaaatggtaatggaaaatcaacattattatcagttatcatggggcatcctaaatatatagttactcaaggtagtatctacatagatgatcaaaatgttttagaaatgagtgttgatgaaagaagtagggcaggaatctttttaggaatgcagtatcctcaagaaattccgggtgttacaacttcagattttttaagagctgcattaaatgcacatcaagaaaaaccagtatctttatttaaatttgtaaaagcactggataaaaatattgctgatttgaaaatggatgagaatttagcacatcgttatctaaatgaaggcttctctggtggagaaaagaaacgtaatgagattctacaaatgaaattattacaacctaagtttgctctattagatgaaattgattcaggtttggacgttgatgcgttaaaaatagtatcacaagcaattaacgctatgaaatcagatgattttggatgtattatggtttctcactatgaacggttgtttgaattggtgccaccaagtcatgttcatgtattagttaatggtaaaattattttaagtggtggaattgaagtagtagaaaaaattgatcaagaaggctatgactgggtaaaagaattaggagttgaaatcgctactgatgaaaagaaaccgattttacttgaaagttgtgccaataaagaaagaatgaaagctaaataatgaaacagttaaaagagattaaaaattatttagtatttcataatggtacaattgaatgtcacccagaaaatgtaggaattgctattaatgatggtaaaatcgatgttaaagatgctgcctcattacaaattatttatctaattgatcaagaaggaaaatattgttttgacctaaagattaaaggacaactggaattaattgagacttatgattttaaagttccagcatctttagttaaaaacattgaagtattgcaaaatagtaatattttaagatataacgataatcaaagcagtgtcaacgggactgttgaagtaactgaaaatgtatcggttgagcgtgatagtaatgtaagatgcgcttatgttgagttatcagattcaagtattgaaatgaatgttaatcatgctttgaatggttctaacgctaatagtacggtgcgcttagcttcattagctaaaggacaggaaaagaagcatatgacattttcgttaacgcattttgcaccacatacaaccgggattatggataattatggtgttgttaaggatgcatctaatttagttatcgatgggattggaacaattaaacaaggaaatcatcaatctagcagtcatcaaacaaataaaattattgtttttgatgagaaatgtaatgccaaggcaaatccatatttatatattgatgaatatgatgtaaaagcaagtcatggtgctagtgtcggtaagattgatgaggatcatttgtattatctccaatctcgtggtttaagtaaaaaagatgcaatgcatttagtaacttatggatattttattccagtcatggaatttatagataatgctgatttaagagagatgtttaacgaaacattaaaagaaaaggtggggatttaatgttagatgtagaaaaaattcgtcaggattttcccatgttaaatggtgctacgatgcatggtcaaccactgatttattttgataatggcgctacaactttaaagcctcagtgtgtaattgatgctgtatgtaattatttgacaaactattcgggtaatgcacatcgtggtgactatgacttatcgcatgatgttgatacacagttcgaaaagacacgtgatttagttgcaaaattaataaattgcgatcgaaaagaagtagtttatacatatggttcaacagacgggctaaatatgatagcatttggctatgggatgacgcatctagatgaaggtgatgaaatacttttaaccgttgctgagcatgcctcaaatactttaccatggtttgaagtctgtgatacggtgggaagtacggttaaatatattgatttagatgatgaaggacgtcttactgttgctaatgttttaaaagcaattagtgataaaacaaaaattatttcaatagctcaagtttcaaatgttcttggatttgatggaccaattaaagaaatttgtcaaattgctcatgagcgcggtattatcgtttgtgttgatggtgcgcaaagtattcctcatgaaaaggttgacgtccaaacattagatattgattttctagttttttctggacataaaatgtgcggaccaactggggtgggaattctttatggtaaatatgatttattacaagaaacaaaaccaactcgttggggtggtggaagcaatgcccgatataagagctgtggaaggattaaattaaaaaatgcaccggctaagtttgaggctggaacacctaatattgagggtgtcattggtttaggtgccgcaattgaatatttaatagaaattgggatggacaatattcgtgattatgaattagaattacgtcaatatgcggttaaaaaaatgttagaattagataatttggaagtttataatccaaatggtcatggagcgattgcttttaatatcaaaggtgtttttagtcaggacggagcttcactatttaacacatatggtattgcaataagagctgggcaacattgtgctaagattcttgatgaatttttagatgttagtcaaactcttagagcatcattctatttctataatacatttgaagaaattgacagatttattgaggtatgtaagaaaggagatgactttttagatgccttctttggatagtatgatgttacgacaaataattatggatcactatgaaaatccacgtaatcatggactagtagatgatgataattatcagtcagtaaatatggattcagaaacttgtattgacgatattgatgtgcaagccttaattgaagatggtgttattaaagatatccgttttgatggcgaagcatgtgcaatttgtactgctagtacgtcaattatgagtgaattattgattggtaaaacaattgatgaagctaatgttattattgaaaattacaataatatgatttatgaaaaggattatgaccctgaaattttggaagaagcaattgcgtttatgaatactcataaacaggctaatcgtattaagtgtgctactttaggatggacaggaatcaaacagatcctcgataaagaataggaggaaacatatggcagatataaaaaatgaaattcctgatcaggaatatgcctatggttttaatgatggtgatgtttcagttttcaagactcctaaaggaataaatgaagaaattgttactgaaatatcaaaaattaagaatgaaccagaatggatgcttgaatatcgtctaaaatcttatcgctgctttatggaaaagcctatgccaacttggggcgttaatttagaccgtattgattttgatgaatatacttattacgttcgtcctagtgataaacaaacgaataaatgggaagaagtacctgaaacaattaaacaaacatttaataaattaggtattcctgaagcagaacaaaagtatttatcgggagttagtactcagtatgaatcagaagttgtttatcataacatgttaaaggaagttactgaaaaaggtgttattttcctagatatcgatagtggtttacgtgagtacccggaaatatttagaaaatattttgatactgttattccttataatgacaataaattttcagctttaaatggagctgtttggtctgggggatcttttatttatgtaccgccaggagtgaaattagataagccactacaatcttatttcagaatcaattctgagcaaatggcacaatttgaaagaactttaatcattgttgataaaggagcggatatccactatgttgaagggtgtactgcaccaagttattctcgtgattctcttcatgctggagttgttgaaattattgtgggtgaaggagcaaaatgccgttatacaacgattcaaaactggtctaacaacattttgaatttagtaactcagcgagcaaaagtatttaaaaatgggtcaatggaatgggtcgatggaaatattggtagtgctgtaactatgaagtatccaacttgtgtgttgatggaagagggagcaaaaggttcttgcattactattgctgtagctggtgagaatcagattatggattcaggttcaaagatgattcacttagcgcctaatacatcaagtagtattgtttctaaatcagtttctcgccgcggtggaaaagtcaattaccggggaatggtacagcatggtgctaaagcttataattcaaaaagcaaggttgaatgtgatacgttgattttagatgacatttcaactagtgatacagttccggttaattggatgcgaaataatgattctattattgagcatgaggcgactgtctcaaaaatttctgaagaacagcttttctatttaatgtctcgtggtttaacaaaaaaagaagcaatggaaatgattgtaatggggttcattgagccgtttgctcgcgaattaccaatggaatatgctgttgaactaaatcaattaattaaattggattttggggatcagggtattggataaaaaagtattacggaaacaattgattcaagcaagattagatttagatagcgaaacttatgcatctaaatctaattttattgtttctaaattaaaacagcaacctgaatttattgaggcaagagcaattggaatctatgtttcttttagacatgaagtagaaacaatcagtttgattaaggaaataattaataataaaattgtctgtgttccaaaaattagtggtaaacagatggatttttatcaaattaattcaatcaatgaattaaagacaagtaattttggaattttagaacctaataatagtcatcctgttactaaagataatcttgatttactaattgtaccaatggttggctacgatcaaagtggtaatcgattaggttatggcggtggttattatgaccgctatttaagtgattattgtggtaatgtaattggcttggcatttagtttccaagaagttgcaaatttaccagtagaaccatttgatttgccgattaaaaagattattaatgaaaaataatcacggttttgttataatggggaatataaagtagggtgaaattatgtcaagagagaaaacattagttaaaaatacgttaattatggcgttggggacttttctgcctcggattattaatttattgactacgccaattattactagtgcaactactgatgcgcagtatgggcaattagatttagttacaacgacgattctttcatttattgtacctttatgtacgttgcaaattgaacaggctctatttagatttcttgttgatgctaaaagtgaaaaagaacaacggcgtgtcattactaacggatatgtaatgatttttggacttatggtgattgctgcgattatttgtctgtttgtgccaatcagcatgtttgaaggcagttttaagctattgattattggatatatatggattgagattattgcaacaacttctaggtttgttttaagggctttttccaaatataaagagtactctattttggcggcgttagttgtaatagtcaactttgttgttgtctcagtttgtttattgtggctaaagacagggtatattggggttttaatagcattagtagctgctgatgtagtcggctttatttatgtactatgcgtatgtaatatttttaaattttttaattttaaatattttagtagcgaatatgctcttaaaatgcttggctatgcattaccgtttgtacctaatatggtatcatggtatattaatcaattgtctgatcgatggattatttcaatttttctaggggcagggccaaatggtgtttatgccttggctaataaaataccttcgattgttaatatcttatatccggcctttaatttagcttggacagattcggcaacaaggagtgtaaatgatcctgatagtggtaggtattataataggatgtttcggatgttgttttgcattgtctcagcaggttcagttttattagtggctggatcaccgatcatctttggaattttatgccgtaataaagaattatatagtgctttcgattataccccaaccttaattttagctacatatttttattgcttctcacaattttttggaagtatttatgtagctgttaaaagtgctaaaaatatgtcggtaacaacgactattgcagctataatcaatattatcatcaatttaggtttgattaatattattggagtacaggcagctgttctttcaacattggctgcgaatttatttttagcgggatatcgcttctttgatttgaatcggcgctatgtacgtttaaaaataaataaacgtctaacagtgttgacaatcgtaatttttataattagtatgtctttagcatggtcgggagataaaattttatggatattaaatattgttattgcgcttggctacgcatactttatttctggtgatatttttattggaatgtttaaagctgttttaaagaaacgttaatagtaataatgttaagatttaattatttagcaaagtaattaaattttaacattttttttatgtccttttttgtatagttaatattaatgaattgggttacaggaggataatatggaagcatatcaaaaatcgtttaaagaggtccagcaagcactaggagtcagtgataatggattaagtcaaaaagatgtaattaagcgtcaaacacgatatggaagaaatgaaattattggtgaaaagcgtcaaagtgtttggggaatcttttttgatcagtttaaagatttattagtaataatcttgatttgtgcgggtattatttcagctattagcggagaatttgaaagtacattggtcatcttggttgtaattactttaaatgcattgctaggaacatttcaaactgtaaaagcacagaaatctttggatagtttaaaaaaattatctatgccaaaaataaaggtgttgcgtgaaggtaaattagttgaaattaaatcaaacgaattgacagtaggtgatttggtatttatccaggctggagatgtaattgctggtgatggacgcttaaaagaagcgaataatcttcaagttaatgaaagtgcattgacaggtgagtcaaatagtgtcgaaaagcagttagttgcaataaatcatcaatgtactattggagatatgacaaatatggttttttcaggaagcttagttacaaatggaacagggcaatatattgttacaaacattggaatgaaaacgcagttaggaaagattgctgagatgttgaatgcaactaaacagcgtcgtacgccattacaaaagacgttagatgaattttcagtaaaattgtcaattggcattatttcaatctgtattattgttttgtttatggatgtctttatcgcaaaagaacaattgctcgatgctttgatgattgcagtagcattagctgttgcagcgattcctgaggcattaggatcaattgtgactattgttttgtcgatttcaactcaaaaaatggctaaagaaaatgcaattattaaaaatttaaatgctgtggaaagccttggttgtgtttcagtgatatgttcagataaaacaggaacattaacccaaaataaaatgacagcagtcgatatatatacaaatcggatgttaatacaagcaaatcgtttaaatcatcatgaatattgtcataatatcttattaaaggcttttgttttatgtaataatgctactatttctaaagcacagagtattggtgatccaacagagattgccttactggaattatatcaagattataattataaaaacgcatatagattgcagactaaacgtcaacaggaattgccgtttgattccacccgaaagctgatgagtgttacttcaaagaatcatctatacactaaaggagccccagatgttttattaaaacgatgtaatcgaatattaatagatggatataaagaaatttttactaataaagataagcagcgtattatggaacaaaatgatgctttggcgcgccagggaaagcgtgtattaggatttgcgtataaagagttttatcgtaatacattagaaaaaagggatgaaaatgatttagtttttgttggtctagtatctttaattgatcctcctcgcattgaaagcgctcaggcggtcaaagattgcattttagcagggattaaaccaatcatgataactggtgaccatgttgtaactgcgtgcagtattgcaaagaaaattggtatttttaagcaaggtgataaatgtttagagggaactcagttagataaacttactgatcagcaattgcggaattacttgccacatgtatctgtttatgcgcgagttgcaccagaacataaaattagaattgttcaagcttggcaagcacgtggagcaattgttgcaatgaccggtgatggtgttaatgatgctccggctttgaaacaaagtgatattggggtagcgatgggaattacggggagtgaagtttctaaggatgcagctagtatgattctgacagatgataactttgcaactatcgttaaagcaatcattactggccgaaatgtatatacaaatattaaaaattcaattatctatcttttatctgggaatttatccgcaataatttgtgttctagttacatcatttgcaattttaccaactccttttttgccggttcatttactatttattaacttaattacagactctttaccggccattgcgattgggatggaaaaggggagtgatgaaattctaaagcaaaagccacggggatcgggcgattcattacttaataaagagacaattttacaagtgagttttgaagggataataatttgtattttcacaatgttagcttattttattggtttacgcagtgatgaattgactgcttcatcaatggcatttggaacactttgtttggcgcgactattgcatggatttaactgtcgaagtaacttgccactatataaaattcctgtaaattattatagtgttggagcttttgtaattggagtatcattattaacatggattctaatttctcctaattttcattcacttttttcaattagtgaactatcactaaaacaattagcaataatttttgtttctgcagcatttccaagtattattatccaaatatataagatggtttcttcgaggtataattagaaacaaaactaaatataatatattggtggtttaatgaaaaaacgatatatatttattgtaattaccattattttagcaattgttattcaagttcttagtgttaatattactcctgcattaaagaagattgcagacaaagaaataaatcggttttgtcagatggtaatcaacaataccccttttccagttacattagaccatcaggaactgatcaagatcaatcgtaatggtgatgaaattgcgacaattaattttaatacgagttatgcttcaagtattggagctaaaatggttaataaattagatgaattgtttgtagcgattgaagaaggaacatataaaaaaacagataattctttttatcaacgtcgatttcaaaagatgagtgacgaaggtggggtaatcgcttctattcccattggagcattaacacaaaatcctttcttagcaggtgttggacctaaaataaaacttaaatatgaaactatatctgcgattacttgctcagtcgaaaaagatgttaaaagctacggtgtgaatcatgttatggtttctttgaaattggttattaaaattaagatgatggtattattaccattttataacgaggagtttaataaagactatgactatccattagtgatggaaattattgaaggggaggtgcctaattggtatcagaattagaaattttacaacgtttttatcagatctatctagaacaagaaagtgatttctttagttttcaaggtaatttttattatttatgcaaggttaataattttactagtgactatccatactatgtaaatgcattaggactaaatggtttcatggttgttaataactgttttaatcgtcctatctcaatggactatatattgtatacttatcaaatcgaagattatcattttgaaatgtttttacaatattctttgcgacctttagatattcaggttgaagttttaaaaattaaagaaagctggtgtgcaattcttgatgaagcaaagtgcaagattggtaactatgcttcaagaatcagtcattttgaacattttgtagtgctgtcatattactatcaaggtcttggagaagccgcaattagcgtgttaaatgaaattagagaaactaagctagtagcggggatagaacactttaatatgatcgataactatgagatgctttgctgtccagctaatttagtcatagcttcaagagtcaaggatttagctagtagctataaaaataatttgatttcagttgaacagttagaagagtacattcagattagcgctctaacagtagatgaaataatttatctctattcacgattattgtttccaagtgaatttatgcagctggcaatcaatgatgattgtaatgatgcacaaataaaaaaaacacttttgaatatgtatcaaaatatagataatcaaaaagcgtctttagtaattgcgtggcaaatgttaaataaatatactcgtttacccaaaattgcctggttataaaagccaggtaatttttaataaaataaaaaacccacacttagtgtgagcaatttactaatggagcgggtgatgggaatcgaacccacgtagtcagcttggaaggctgaagttctaccattgaactacacccgcaattttaatgcattaatatgatagcactatttttaaatggtgacccgcaggcgattcgaacgcctgaccctctgattaaaagtcagatgctctaccagctgagctagcgggtcattattaatggctggggtacctggattcgaaccagggagatgacagagtcaaagtctgttgccttaccgcttggctataccccaatgaatggtggaggagggcggattcgaaccaccgaaccaaaggaactgagttacagtcagccgcgtttagccacttcgctactcctccatcatggtgccggctaaaggacttgaaccctcaacctactgattacaagtcagttgctctaccaattgagctaagccggcctattttattttaaatggtggaggttaacgggctcgaaccgctgaccctctgcttgtaaggcagatgctctcccaactgagctaaacctccagtgccttggtgcctaaatatattatcatttacttttcaattagtcaataaaaaaaattataataaattaatttttttataattagtttaatataataagcacttcttttacattttggccatattttaaatatttatgcaaaagaaaagacgatcaaagatcgtcataataattaatagcctggtttaccaagtaatttaaacatatttgctttgtacacttcaacacctggttgattaaatggattaacaccaagtaaatatacagacatagcacatgacatttcaaagaaatataccatgtaaccaaaaccataagcatccattttatctaaagtaatcaaaatgttaggtacattaccagtattaacatgagcatcaacagttccttcacaagcttttttatttacatagtctacagatttacctgctaaataattaagaccatctaaatcatctttatcactaggaatagtgatatctccagctggttctttaatttgcatgattgtttcataaagaacttttgtaccttcttggataaattgtcctaaagaatgtaaatcagttgagaaagtagcactagtaggtaagatacctttaccttctttaccttctgattcaccgtaaagttgtttccaccattcagctaccatagctagttgtaattcgtaagttacaaacatttcagcagggtatccggctttgtgtaaaatctgacgagcaacaccatatttataagcatcattttgatcaagatcagcattaccgtatttttccatcgcatctttagcaccttttaacattgcatctacatcaattccagccattgcgattgggaataatcctactggtgttaaaactgaataacggccaccaacatcatcaggaattacaaatgtcgtatatccctcttcagtagccaaagtttttaatgcacctttagccttatctgttgtagcaacgattctttctttagctccaactttaccgtatttagtttcgcacatttctttgaaaattctaaatgcgatagaagtttctgtagttgtacctgatttagaaattacattgatagcaaaatccttatctttaatataatcagctacttgtttaatataatttgatgaaaaagtatttcctacataaatgatttcaacatcattagttggatataatccgttgattgcttcaattgctgcacgtgcacctaagtaagatcccccaataccacaaactagtaacacatctgttttttctcttagactagcagctgtttctttaattaattcaacttcagctttatcataattttcaggtaattcaacccacccaagaaaatcattaccagctccagttttgttgtgaatcatatcatggatttcttttactttgtccttgtatgattctaaatcctcgcttaatttagctttagataaatctaatgtaatcattttaactttcctccgtgattccttgtttaagccatttttccatggcaagagctaatggtttgaaaccattaggcgtttcaacgattaatcgtctaggattcttatagtaaacacgtttattgcgtctacgataacgattatcaatggctttcaagctaagtttagcatggttagtttcctgatcaaaatcaataacttttactttgattgattcacccaccttaacaaaactatcgatgcttttaacgaatttatcagatatttcggaaatatgtattaatcctgttgaattatctggtaaactggcaaaagctccatatggctggataccagtaattttgacatcaatgatatcaccgcgtttaatcttttggctcatttaataatcactccctgcgtggatattatagcacaaaataaataaaattatttcattttttataaataatacaaaaatcattgataaggcaatagatccaataaatttagtatatttttttattaagtaaaagaatacatttttaaggttgttaaaattaaatttaagctaagaataaagtattacgccatctagaaccaggaataacaatttaaagaatgtagtagaagaatagttattctaaaattatgtgaaaaggaaatgaatgatttgctggtagaagtaagatggctttactagttttaaaagacgattagagaattaatgaatataaataggctggaattattgtccagcctatttgtgtatataagattattttctaaatatctttaaattactgatatattttatttattagtagtctaaaacaataactagattacaattttgatacttggtcacttaatcctttatgctttagaaagattgatataatttgcgatatgagagtaagcattctaagctcttcttttgtccatattcgttttcctgtacattcatcaaagccaacgaaaccggcaatcatttcctgctcatagtacgcacactgtagtgtagaatgaattccttgggcttcaaacagttgtctttgttttttgcttaatgacgtgacatcatgacagtagaagatagaattttcatcgaatactctttcatattcatccatatcatgataagaaatattttgtagttgttcttttacagcggtgatcccttcattacaccattcatatgtattggagcaatgttctttgtctgtcatggtttcgaaaatataagcacggcttacgtcatagcgttttccagtaatttcaagaatcagattaatagctgtttttaaatctttgttttgaaatagaatacgaaaggcgtaatctgctaatgaaacagatgtttcactataagattgttgtgaatcgatagttgcacctagtgaagaatatgcggtaatactttgctgattacaagatttttcattatatacgatatatgtattcttgccttggattttggcttggtaaagggctttatcagcatttgcatacaattccaaaaaattatgtccatcttttggatataaagcgataccaatactgcttgttacctgaatcttacttttctctttgtcaaatagatgggcaaatgttttttgtagttcttcagctttcttttctgcatctaagtggctagtaatatttttcatgaaaataataaactcgtcaccaccaattctaccaacgacatcactatcacgtactttctttttcatagccgttgccatttcacctaataccatatctccagcaatatgtcccaatgtatcattgatttgtttaaaattatctgtgtcaatcatgaagagtgctcccttagagtcatgatgttcaataataaagttttttatttgattttcggtttcagagcggttgtatatcccagttaatgcatctttttctgctttatgctgtaatgtctttattttttgtctttcatctgtaatatctagacccatactataaaaacaagggataccatcccagctgtccctttcatctacgtagcataatgtcagtgtccagatacgttcttctttattacgggtatagactcgtccctcgaatacaacgctctcttttgaatttcttaatttatgaacaatctgcttggctctttttaagtcctcaggatgcatatagctttttaactcataacgttcacttttaaattgttcttttgtataaccaatcattttaagaaaaatatcattgcaccagagaattgaagaataatcccttgcatcaacacgtaccatcgcggcagaaatggtttttaaaattgcttctcgttcttgatctttttttgctagcttatattcagtactataagtgtcatgggaaagctcaatacgggcagagtggccatgccaattcaacatacgatccttgataataaaatttctttttaaaaaagggttataaaactcccattcataagtttgatccttttttaaatatttatttgtacagaaaggacagggggaacttctaccttgtatgatttcataacactttttccctattgcttgttcagctctagtaccaagcgtttcacatgcaactttatttaaatatagaagttcatatgtgtcaatatcactgatataaacatttccggcattttctgccatcatccattgaaagttatctatatatacatttttagttgaaatgagtgtattctgtgtattgatcaaattactaatatcgttatatgcaattgttattacttcgaaagaaagtgaaatagataatttaatccattttatttcatcatgtctaaaaggaattcggattatacattcttgatgtaaatcacgatgctcttgcaactttgctaattgattttcaagaataataaaatcatctgtataaggtttgtagtatgtttttaaatcctgccaaatcattttaaaatcttttttttcatgcccggtcattttataaaaagcatcatgtgcccatataaatgagagttttttatcaggtttgtgtttactaattggagttgccagagtatttaaatatttttctaaaatagcattttcattaatcgacattttctttgcagtatttttattgttcatcataaccacccctcctgatatatcacatttatatcacacatatcattcttttattataacatagtaatttgaaaacgctatcttttcgttctgctgaatagttaatgaagttaaaatgtaatattgaaatatctaataaaaaatattttacaataaatttttgttaattttggtagtggtcagatagtataatgatttaatagagagactaaaatttgatagaagcgaaggtattatagtaaagttttgttttggtaattaagtcatagaggattttttatgaagaatgaaatattttatgaatatgaatcattagaacagagtaggaaatagaaggatatttttgttattaagaacaaaaaatcaaaacataattaaaaagattgacttcattatgagtgagaaatcaatccttatatttaaattaaaatattgtgtctagctttgtaattttagcatatatgtacgtagttagaacatttgtcagacagataaagaacctcagtttagtggggctctttatctgtgttacatgtccttttgcatgtttgagaaatgagagttttgggacttatactcatttcccggatatattatatcaaaataaaaagaagaatgaaaaaataatgcactattttttatcccgtaatagctgatatattcttgcaaaagaaaaacagtcattttttaaagaaaaaaaaataaaaaagttaaacaattaatagtgatgaagaattaatagtgatgaagataggatatttagtagtaatggtctttattaagtatcttgttttacaacaccgtcattacagtgtttttcatccgacagttagtcgattataatatagatcatccaagtgatttttatggtttttagttaaaatcatattatcctagtaattttcttaattaaagtgtatatttatttaaaaataatttttttgtggtaaaatagataagtgctaaaggagtgaaggacaatggaaaatacaagtacaattgaagaagtagaaaaagtaattaacaaattaagaccgtacttaaatcgtgatggtggtgacatcgaattaatagattttaaagatggcattgtttatgtgaagatgttaggtgcctgtgcgggttgttcaatgttagatgaaactttaaaggatggtgttgagcaaatcttaatggaagaagtaccaggagttttaggagtgcaaaatattttagaaggaactgagtattaatttaaaacaaagttgagacaaaaaaagattcattccatgctaaaatattagtatctaataaattgcttgcaataatgtcttagatatattattatgtatttgttgttttaaggaatattattttttaatttatgcaaactaagttaaggtgataatatgaagaatgtaaggcaacaaaaaatgattgccagtatcttattagatattggactcgatgacgatattattgaggtaataacgtcactaactaaagaagaaatagaacaaataaataaaaaagactcttattaagaactactagatgaagatcgatgatgtagtggcaaccctatattaaattagaaggtgcctaactgagcaagtttatacttgaacaatgagagaaggcttcctaactatgtatgctttctctttaggaagcttttttatttgtagaaggagaaagaaaaatgaaagaaaaagtattatttacctctgaatcagtttcaaaagggcatcctgataaagtttgtgatcaaattagtgatgctatccttgatgcgtgcttaaaagaagatcctaattcacgtgtggcctgtgaagtttttgctactactgatctggtagttattggtggagaaatcacaactactgcagaagttaactatgagcaggtagctcgagatgttttaaaggacattggatatgatgatagcgataaaggaatcgattatcggacttgcaaggttcaggtagtaatggatttacagtctcctgatattgctttaggaacaaatgatgaagttggaggagcgggggatcaaggaatcatgtttggttacgcctgtaaagaaacaaaagggtatatgcctttgccgatttcaattgctcatcatttggttcgttatgcaactgaaaaaaaggatactggagaatttaagtcagctcgtcctgatatgaaagctcaagtaacgattgattataccgaaagtactcctaaaattgatactattttaatgtcgattcagcacgatcctgattttgatgaaactgaattcaaacgttatattaaagaagaaataatggatgcagttgtaagaaaatataatttaaacactgattataaagtgctgatcaatccaactggtcgctttgttattggaggaccgcatggtgatactggcttaactgggcgaaagattattgttgatacatatggtggggctgctcgccatggtggtggggcttttagtggaaaggatccatccaaagttgaccgttcagctgcctatatgttgcgttatattgctaaaaatattgttgcggcaaatctttgtgataaattagaaattcaggtttcttatgctattggagttaaagaacctacttcaatttttattgagacgtatggaactgaacatgttgaccatgatataatcctaaaagcaatcagagataactttgatttaactccaggaggaatcattaaaacgttagatttacgtcaaccattgtatctaaaaacagctgcttatggacactttggtcgtggggataacaatcttccatgggaagagttagataaagtagaaattctaaaaaaatatttatagataaaaatgctcgatttattcgagtgttttttgtttatgttaaatttagggaaattttatcaataatttgagtgttattttacaaatatatattgtataatatgtttatacaaaggaggaattcttatgaaaatctcagtaagaggaaaaaacattgaaatcacagaggctatcgaagcaaagatttcagaaaaactatctaaattagataagtatttcatcgtaagtgacaatgttgaagcaaaagttttatgtcgagtttatccttatggacaaaaacttgaagttacgattcctactgaatatgtacttttaagagcagaggtcgtagatgatgatctatataatgctatggatctagttgttgacaaattagaaggacaaatcagaaagtacaaaactagactaagtcgtaaatcaaaagataataaacttgcgttcaacctatcttcaattgaagatgttgaatctgaagaagatgtcttggtaaaggttaagtcaattacccctaaaccaatggatatggaagaagcaatcatgcaaatggaattgattggtcattcattcttcgtttatcgtgatgttgaaagtgattcaattagtatcgtatatcgtcgtaatgatggtgattatggtttaattgaaactagtaattaataattgaataatagaaaaagccctaaatgggcttttttattttacaaccttgataataatctttagcaaccattaatttatcaatatcatttaagatagttactttacgaattgaccataagggagcgactaaatctgaaatatttccatctccggttaatctttcaataacaatattttctgggatgtaacttaattgtttgacaactaaatcaatatattcgtcacgactcaggattttaaaaggctgttgtaaatataactgatgtaattttgttttttcaatgacataaagcatatggatctttaaggcttgaatgtccaactgcccaaccgcctttgctgtttcaagcatcatttcatatgtttcaccaggtagaccattgataatatgtacacagacattaatttttaattttcgtaatttattcaagccgtctaggaagtcttgataattatggccacgattgattagttcacctgtttgatcgtgaatggtctgtaaacctaattcgacccataaatcgcagcgattattaacttctgctaaataatttaaaacatcggtttccaagcagtctggacgagttgcgatgctgattgcaaccacattttttttattgataaatggttcgatacaagctttgattttttttaatgggccgtatgtattagtattggcttgaaaataagcaatatatttacaatttggccatttattttgaagaagcaaactaacattactaaattgtatttctaatgaatcctggatatttccggcaaaatcacctgaaccagtgctgctacaaaaaatacagccgcccgtgcctttagtaccgtcgcgatttggacaagtaaagcccgcattcaaactaactttggcaactttactttgatatttatttttcagataataattaaaagtatgatagcgtttattatcatcactatatttaaataagttcattttatcaccattgctattataacataaggaggacgttatggcattacaacttattaatattactaaattttataagtatggaaaaaagagacaacgcgttattgatgatctaacaattaaatttccaagtagagggatgataggaatcattggtcaaagtggtacagggaaatcgactttgttaaacattattgcgggaattgagcgtccatgcaatggtcaggtattaattgatgggcataggctcaactatcaacaaattagaatgtatcaacgtgattatattagttatgtttaccaattttataatttagtcaatgctttaacaataaaagagaatttaatcttaattacaaaaataaaaggtattgatttaaagcaagtgtctggtcaattggaggagtattgtcgaactttaaaagtagttgaattgttggaaagatatcccgatgaactatcgggtggtcaaaagcagcgaattggattggttcgagctttcttgtgtaatacaccaattcttttagcagatgaaccaactggagcattaaatgataaattaagtattgaagtgatgagacttttaaaaaggtatgccaaggagcatttagtgattgttatttcgcataattctcgattaattaaacaatatacaaaaatgattgtagatcttgataaaaaaaagaattattataattttagtaatgaacgatatcataaatattcaccaataatcataaaaaagcagccaggtcgactgcttttttattgtaaaaggcaactcaaatatcaatttaaaaagataataatgatgtttgtatcacaaatatttattattctagcttttgttttattattaagtgcttttaatggtggatggcaatatttagaaaaaagatttgaagaagacccattaaaaagagttattgaagtttcaaaaaatgattatattaataatatctttgaacgcaaagaaattaaaaaatttgagaagaataataaaatagcaaatgttgcttacaaattagtatttagtaatggaattttaagcagttatgatgaagagttagacgttgaggtatatcagatatttaaaactaaaaagttagattatatttctgggaaatatccttcaaaagagaatcaaatattaattaatcagacaacggcaaagaagtataaattaaaaataggcgagagaattaattttgaaattaatgatgatgaatatgaattcactattagtggaatcattaatgatcatattaatataggggttaatctttatttagaacaacagtatttagaagaagagttaagtgatgattgcctggataaaacagttttaatatttcatagtgatcaagtagatgctgtgataaaagaatatcaaaaagattatttgctgattaatctacacggtgattatattgacaactatcgatcaatttttgatatcactagatttgtgattttcttatttattgtaattagttttgctatttcattaattttaatttcagttattcttaaaacaatttttattgaacgaaaaagaaatactagtcttttattggctaatggtcttggtaaaggtaaagcaattaatttattttgtcgtgaagcaattttgataggagggctgattggaagtgcgggagcaatcttagcaatgggcgtattaagattaattgagctatttgatttaagtgattatttatttaacattccaaggttgtttgtcttaccgaaatatatttttacaaaatatgatttatatgtagtgttgattgttatttatataattgcatgttatttagcagggttacaagctagtcttaaaataaacagaatggatattagcatattgttaaaggagaactaaaatgctggaaattaaaaatttaactaaaagatatgatgaaactattattaaaaatttaaacataatattaccaagtacgggattgatcataatagtaggaaattctggatgcggaaaaacaacattattaaatctaattggtggaatagatcaagattatgaaggagaaatattatttgatcatcaagatattcgaaaaattaaaaagtattgtcgtaggcatattggttttatttttcaggatttcaatttaattaattggctaaatgtcaaagaaaattatttgttagcaaaattttttactaaaatttcatataaaagagcagttgaagatcaagaagaaaaattagaactccgaaaactgaataaaaaaagggtcaaaatcttatctggtggacaaaaacaacgggttgcattacttcgggcgatgattaaaaatgttgatattttattgtgtgatgagccaacaggttctctagatgataaaaatgcaaagatggtttttgaattattacatgcagaagctaaggaacgacttgtcattgttataacgcacaatgagcaattagcttatcaatatgctgatcaatgcttttctatgcaaaatggacaattgattgggaagtatcgccgggataaaaataatcatttttattcgcgtttagtcaaacagcattcaccattaaaattatatcaactggcattgttacaatatcgtgctaatttgggtagaaatttaaaaatatcatctggtattacagtagctttgatttgtattatgattacctttacactgagtggatcattacaaacccaaataaaaagacagcttgattctatatttccaaatcaactaatttcgattcagaatgtacataaaaaattacttagttatcatgagttactttcattatcaaatttagatatgaatgaatttatctatggggaaccagccgattatgaatttatgggagtatcactgcaaagtgattatgaagttgaaaaaacaatttatatcagtgatatgactaaaccaataaaaagtaggaatttggaaataggacgtgaaacaaaaaatagtaatgaaatagttttatcaaaaacaacggcaacacatcttaatcctgattatcaaaaattattgaatcaacaattatatggatattatttaaaggacgatcaaattaaaggagtctcactcactgttgttggaatagggaaagatgtaactgcttttgacacaatctatattaatgaattagctaatctcgatcatattagccaagcttttgcgattgataagaaacaattattgtttcaattagctatgatcaatttaaatagcaaagcggatcttgatgatcttttaatggatttagaagatcagtatagtcaatttgaatttaaagttgcaggagaaaatattaatgaaagaatagatacatttatgttacaaattcaaagagttcttttactattttctttattggctatagtagcagcatgtttcttaattggggaagtgttatatttgtctgttatagaaaaaacaaaagatatcggtatttttaaatgtatgggtgcgagtaaattacagatcatgaatttagttttattagaaagttttactttaattagtggagcgtttatctgctcttatgtatttttttatcaattagttaatttaattaatcagcttgttgaaaatgagctgcagcttgatttatcaggagtgtttattcaaattgattatcagttagtaattgctatctatttaggagcattatgttttggattgtgcagtagctatattcccgcctttttggcaggccggttagatcctattaaagcattaaaacaaccaaattattagtaataaaatttgttgcatatcagcctttttatgttataatattctagtatttgaaagtcgatgaataggactagtagtaattgacgttttttatagagaatcagtggctggtggaaactgataaaacgggttatgaactcacctaggagatgcagcggggaattaagtagtcgttgtcgttaactgcgttaaagttttgagggctaggtcttttagacttggaactaaggtggtaacgcgattaaaagtcgtccttagataggatgatttttttattttaaggaggaattataaaatgccgtttgatcacaaacaaatcgagccgaaatggcaaaaatattgggatgagcataaaacatttaaaacagactgctacgatgatagtaaaccaaaatattattgtgtggatatgtttccatatccgtcagggaatggtttacatgtagggcatccagaagggtatactgcaacagatattgtttcaagaatgaaaagaatgcaaggatacaatgttttacatccaatgggatttgattcatttggacttcctgcagagcagtttgctattcaaacaggacatcatccagctgaatttactaaaaagaatattgaggtatttaagggacaaattaaatctttaggtttctcatatgattgggatagagaaatcgcaactagtgatcctgaatattataaatggacacaatggatttttacaaaactttatgatgccggtcttgcttatgtagatgaaattcctgtaaactggtgtccagaacttaaagctgttttagcaaatgaagaagttattgatggaaaaagtgaacgtgggggatatccggttatccgtaagccgatgcggcaatgggttttaaaaattactgaatatgctgaaagattgcttgaagatttagatgatcttgattggcctgaagcaacaaaacaaatgcagcgaaattggattggaaaatcagttggagctaatgttgattttaggattgatggaacagataaaatatttacagtctttacaactcgttgcgacactttatttggtgcaacttattgtgttatggcacctgagcatccatatgtagctgaaatcactacattggaacaaaaagaagctattgaagcttataaagaaagttgtgcaagtaaatcagatttagaaagaactgaactaaacaaagataaaacaggtgtttttacaggagcgtatgcaattaatcctgttaatggtaagaaaattcctatctggatttctgattatgtactagcaagttatggaactggtgcaattatggcagtaccagcacatgatgatcgcgattgggaatttgctaaaaagtttggaattgagatcatacctgttttagaaggcggaaatattgaagaagccgcttatactgaagatggattacatattaattctcaatggttagatggactaggaaaacaagaagcgattgataagatgattgcctggttagaagagcataagtgtggagaaaagaaaatttcttataagttaagagactggttattttctcgtcaacgttattggggtgagccaattccaatcgtacatatggaagatggaacaatgagaaccgttccggttgaagaattaccattagaattgccagctactaagaattttcaaccccatgatagtggtgaatcaccattagctaactgtgaagattggttggaagtagagattgatggtcaaaaaggtcgtcgtgaaactaatacaatgcctcaatgggcaggatcttgctggtactatattcgctatattgatccacataatagtgaagttatttgtgatcctaaattgttagaaaagtggttgcctgttgatttgtatgtaggtggtgctgagcatgctgtattacacttactatattctcgtttttggcataaagtattgtatgatgctggagtagtgaaatgtaaagagccatggcaaagattattccatcaaggaatgattcttggagataataatgaaaaaatgtctaaatcacgtggtaatgttgttaatcctgatgatattgttgcttctcatggtgcagattcattaagattatatgagatgtttatgggaccattggaagctgctcttccttggtcaacaaatggattagatggttcacgtaaatggttagatcgggtatatcgtttatttatcgaacaagataaattaagtgatgaaaatgatcatagtcttgaccgtgtatatcatcaaacagttaaaaaggttacagatgattttgaaacattaggatttaatactgctatttcacaaatgatgatcttcattaatgaatgctataaagcagagacagtatataaagagtatgcatttaattttatcaaaatgctttcttgcattgctcctcatatttgtgaagaaatgtggcaaatgttgggacatgatagttcgattgcatatgaaacttggccaacatatgatgaaaatatgttagtgagcgagacagttgaaatgggtgttcaagttaacgggaaacttagagccaagattcaagtgactaaagatactgatgatgaagctgtgaaggaaattgcgtttgaacaagaaaatgttaaagctcatactgagggtaaaaatattgtaaaagtgattgttgtaaaaaataaaattgtaaacattgtcgttaaataaaatattacaaatgtttaagtagagatacgtctcaaaagccttgtaaaaacaagctttttgaaaaaagtgtctctacttttttatttgcacatatttctatttttagggacgattggtacaaaattggtacagtaaaggggtcattttgtaccaattggtattacgacatttgtgcaacattgttgtgaatccattttgtaggtttgcaacctatataaaaaacgcctctgactgcttggttttttaagcagttttctttatgtaaaaaaaggaggtaattatggataacgataaaagtattaaaacattaacaaggtcaaaattaagaccgtttcgatatcatccttataaggtaaaggaagatgaagacatggcaaatctggtgaacagtattaaagaagagggtgtcattagtccaatcattgtaagaaaggttggaaaggataactatgaaatactgtcaggtcatcgaagattcaaggcttgtcagattttagatataaaagaaattcctgtcatagtgaaagatattcagatgcctgaagcagcaatctatgttgttgacagtaatttgcaaagggagaatcttcttcccagtgaaaaggcctttgcctataaattaaaatatgatgcattgaaacatcagggaaaaatcagtgaagatttaacttcgtatcaacttggtacgaagtacaaaactgattcagctgttcaaatagcacaacaagaaggaacaagtagagcacaaatatacagatatattcgtttaacaaatttaaatgaaggattactggattatttggatcagggaaggatagcattcaatcctgcagttgaactgtcttatttgagtaaaagacagcaggatattttactagaggcaattaatgatttagatgcaactccttcgttttctcaagctcagtatttaaggcaattagctaaagaaggtaaatatactggagatattgtttatgatgttttagatgaacttaaacctaatcaaaaagaaaaactaaaaatcgatatggaagatttaaaagattattttgatagaggaacaacacctaatgaaatgattaagattataaaagaatcgttatctcaatataattttaaacaaaattctaagaaagaagaaaacgatttaaaaatataaaatatattaaagaaagctttaatgtctatttacccgcaggaaaggtggtcagtatgatcagtcaaaatgtttatgtaaaatttgatacattcaatacaagagatgaagtattggattttgtttatgatgagaaagaattaaattcaaatattaacaattggaaagaagatttagataaatatataagttacaaagataaacacttaaaaaaatacagagaggaatccaattacagaaatatatatgcttatcatttaacggtattgatacctattgacttacaaaatcagaaagaagaatttgtaaagaattatatggaaaatattgataagagatttataagaaatatgtatgtatttaaatttattcaaaaaggaaaaggaatctttgctgaaattatggcaattactcgatatgtttataaaaaatcaaagaaagttgctaaaaagtataaaagggatttttattatgacagtcaaaccaaaaaactctgtcttaaaacaaatccgaatgctgtattaaaaattaaaaaaggaagtcatgtgttagacgataatggagaaaaagtatatgaggtaatggaagtatccgaaaaagaagacaggatatttacttataaaaaaatacaggatttaactgaaaaattaaaatcttgtgtgatatccacggtcaatcaaatgacttcttttcctgtaattactaaagttgtttcaagaattaccattgaagatgacgacagtaaacatataaaagcaaaaaaaagaaaaagaaatatcgaaattagaaaaatcaatagaacaattatgagatttattgaatcaatgacttttggaaagattgctgacagtgatgaagtagaagatttaaatgatgaatttgttagaaaagctgataatatgattcataaacttaacagaaaaattgaagatgtagaacagtttttaaataaatggtggcataagaacattttagacggcaactttgccgtgtaataaaaacagaaggcggcaacattgccggatagctttttgtacatttaaaaaatcatcttaaatgtatgaaaataaatgacgaaaggtactgatagttaatcatcaggataggtaaatagaaatgaaaacaataagcgttataaatcaaaaaggtggagttggtaaaacacaaacatcaattaatctcgcagtaggacttgctcgaacagggaaaaaagttctccttattgatgcagatgcacaaggaaatgcaaccaattatttttgtaaggatgtaaacaacctagatttaataaaatttgcaacatcaaattttaatgataaacagccaattgaatggttagaagaaacattaggtgcaccatattttgaaaatgatataaatggtcttttactaggtgagtgcaatataaatgatgcaatatacattactgaatatgaaaatcttcattttattccatcaacggaaacaaaattgattaatacggatcagcttataaaaacttcaaataagctacaacataatagattgaaaaaagcattaagagacataagaaataaatatgactatgtcgttatagataatgcaccaacatttaatacgattacattaaatacattatttgcaagtgatgaaattattattccattaaaagttggaagatttgaagttgcaggatttatacagacaatgaaggaattagaaaatcttatgattgattttgaatgtcagtataagataaatattctctttaatatgattccaagaggaagacgagcttcctatcatgcatttatgaataaatttaaagcattatttgatagtttcgatggattttatcagatacaggttttaaacagcacggttggttatcaagaagcagttgctgctaaatcaagtttatcaagtaaaatgattatagattcaaaaagcaagattgctgaagattacagaaatcttgttaaagaagttttagaagaggaagcgggtgattaatatgagtttaacggacttacaaaacttaaaagcaaaaagaaacagaattattggaatgaaaaaaattgatcttctagatatcagaccaaataccttaaacagttttcctcaagatgatattgaagaattgaaagaaaatatatttgctgaaggattacagaaacctttggaagtctatcaggatggagatcattttgtcttacttggaggacatagaagatataatgctctagttgaacttttaatggatgataaaatcgatcctgatgttaactgtataatcagtgcaaaacctaaagataatgcagatgaagagctgatgattatttcttctaatgcgcaacgtccaatgaatgatcaattacgattaatgcttactcaaaagcttcttaatattttagaaggtaatcctacaaagaaacctgcaggcatggaaacaagacaatggatagcaggttatctaggatgctctgcaagaacagttcaaaaatatatcaatacattgaaaggaaagaaaaaagaagtttttaaagaacccagtcctaaattagaatatgcagaagggttgttaagagacagattatctaccaaagtaaaaattactgaaaaaaagataactgtttcttatacaggtattgatgatcttaacagagttcttgatttaatgggtgcattagaaaaaagtgaaaccataggagatgtcaaaaatgtttaaagttcaaatatcaggaagattggatggaaaacctagacttaaaagagttgcaaacagagatgtttgcaattttactatacgttgtagaaatgaatttgataaagataattcttatgtcagatgtgctatttggggtaaaaaagcatcaagatttttttatgaagttaatgaagaaaaagatatatttattgaaggcagtggtttaaataaacagttaagaaatataaatggcttaaataattatgttttcacagtcaattgtgaaaattatcagatattgacttaagatataatgttttcatctctatatgaatgaacgatatctaatgaaaataatttaatagattaatttagtgttattcataattgaatagcacttttttatttgataaggagaagtctaaaaaatgaatgaagaattaaagaaaaaggtcatagatttattagaatacgctaaaacaaatgaacctgacaagattattgaatatatagatagaaattttataaataatccacatgatatttattgtgctctttatagtacagatttttatgaaacaaacagatcaatctataatttttctgataacaatccaacagtcttaatcgtttcttacgatgaaggagacaggattggaagcaaattcagtaatcctgatattgatatctattttgatttgcaaagagaatcagaattcaatcaaaatcatgatttctttattttgaaaaaaggtaaatttaatcatgacaataatattttggaatatttagatttaataacaaatgattataaattaataaaagaagatatcattgatgaactgacaacaactaaatatgaaacttatattccatatcattatttcaaacagataccagttcaaatgcttgcaaacgaaaatatagaagatgcagtaataaataaaatctgggatgtggccaaaacaaataagaacttgtatgtggatcagtatgactatggacgctttggtggtgaggatgttcctaaatggaaaatgaacgaacttgaatggtttatgaaattaaaagaagaagttcctgtaaatgtaagattaaaatatcgaatgagatttgctaatgaaataaacgattatttaaacagtcaaaaaaaactggaagatgaaaaagagatggctttgtgatgaaaaaagataaagaactgattgaaaaactaaagaaaattgatcttgtgtttctagcctctcaccttggatttactcctgtcagcaaaagctcaaagtattataccttagaagaacatgattcttttatgataaagcttcaggataatacctttcaatggtattcaagaggaaattatggaaatgccatttcgatgtgtatgtatttaggtgctgaagtcgataaaagatttcaaagctacagttattcagttgattatcttgaaaaactatatctgcaaatgaaggataatattattattgataatataaaacctcatgaaaatgtaaaaaaagatccagaaactttgaaattaccattttcagcaaataataacaaaaaagtctattcttatcttcgaaacagatgtatttcagaagaaatcatagattattttgtatataacagatggctttatcaaaacaggtacacagacaatcttgtatttgtttcctataaagaggataagcctgtttttgtatgcgaaaaagggattattcaggagcagagattcatgaaagaatacagtgccaatgactacaatcattgtttttatattgatcatggttcagattgtttaattgttaccgaagccatagtagatatgatgtctcttatggaacttgcagaagattataaaagatacaactatctttcaataaactctgtaacaaaatatcaagctattttcgaacatttaaaaaatgatcctaaaatcaaaagtgtattgatgagagtagatcatgataaagcaggaatcaaattgaataaaaaagtatgttcagaacttaaagaacaatttcctcatatcaggatcagtgttgaatatcctccaaaagaaaaagactggaatgattatttggtctatcaaataaatcaacgagaaaaggttgatgcatatacaatcatattttaaaaaaggcggtgaaagaatgaaatggaaaattattgctttgttactggttgcagttttgatatcaggttgtggttttcatcaagaaaataaagataatcaaaaaaatgagaattattataagctaaatactgatactacaatcagcaattatgaaaagctttcaaatgatggcatagattatatctatcccaattttttgagtcgaaaatggagtgtatctaaacagttagaacgtgaaagttctatgaaagtaaataaatcgaatgatgctgagttttatgtcattagggaaaattatcttaatttcttaaacaaggtagataaatcattagatggacatgaactaaagagctgtatgcaagaagaaataaaaaaatacttaggttctttaacacctgaagacagtaaaatgaattatgtaaacaacattaaattttatgatgaatatggtacatcttcaaaggataatgttaaaaaatattattatatgatcagttttcaaagtgatctggaaatcccatcagtaggtcattataaagtaccaacgttaatgattgttaaatacagtgataaaaatgatatgaacaatgtaaaagaaatgtttgaaaatatgaaaagctggatgctcaaggctgaatgattaatttatgtaattttgtacatttttgtttaaaaatacaaaaggatatgatgaattaaaggagatgaatttaatgaacaaaattattcaggcaaaactaaaaaatagtaaaatcatttttattgctgttatttgtattttaattatcggaatagcaggacttcttatttttaacgctactgataattcttctgctaaattagacaacaaaggaaatattgcaagtaagatttcaaacaatgttaaagaaaaagataaacagaatgaaaaagaagattctaaaggggcgattgaagaagaagataaagacagtgaagatactttggttatttctaaaaacgggttaaatatttcaaaaaaatcagatgtttcagtcaattcaggcaaaaaaagcgatgatgaaaagaaaaataacagccaaaaaagtacaaagagtaatgctgaaacaaacaactcgactcaaaagaacaattctaatagttcaaataaatcaaataaatcaaatacctctaataaatcgaatagttctagttcaaacagtacaaatagtttaaataattcgagtagttctgtttcaaaaccatcacatgaacatgtttacaatattcctgtcactcaaaaggttcatcatgatgcagtgacaaaaacagaaacagttacggtcgtagatcaggcagcatatgatgaaccaatttacgaatcacatcaggtttgtaaagtatgcaataaggattttggtaagggtgaaaatgctacagttgaagctatcaatcatagtgtagaaacaggacattcctatcattctacaagtgttaaagtggggacaaaacatcacgctgcaattacacatcaggaaacaaagacaattgttgtgacacctgcttacgacgaagaaaaagtaacaggctacagatgttcgtgtggtaaaactaaatagtttcattaaaaaaattcagtaaatcaatcaagggcataagatatttaagatatgtcctttttatttttgaaaaaagaagagaaaggaaattaaatgattacaaaaatatatatggaaaaatgggtgttcaaaccttaaggcaatcttcggattgtcttttatttttattaaaggtctgtcatgtttgactgtaaagcctattcaaaaggattaaaaaattaaaaagaagtaattttgcaaaattattatgtttttaggaatgaaaatacaaaaagaataaaaaaaggagaagaacaatgagaaaaaaatattttgataagctatcaaaaatacttgttgtgataggcatgattttctcgatatgtttttctgcagaaaacatatcagttaatgcttgggatggtaatattccccatgaatttacaaaagtaaaatcgataacgtatccagagtggtggaagcgaaaatgtcctcagatcaccaaacaatggtcaacctatatgtgtaaatataatggtcaatggtcgtattgtttagaagccagcaagaagacaccagcagaaggaaattatacggcatccgttattgaaaacaacgtgatggtcagaaaatttctttattatggttttggtggcccagcacaatgtcttttcaaaggacaagctttaacagatgatggcttaaatgaagaagaaacaggatatttatatacacatgttttactaagtttagcttactctggtgatatgtgtggtgccaatattgatgacttggaaaaggcaggtattggcttaaagtcaacatggcaatacgtagaaggattgcctgatccatctaatggcgcaagtttttcaactggaaacagtgctgcatttacggctgtttttgataaaatgaacatgattcaaaaaacaaacagtattaaattcaacgcaagttccaatgaaacagtacagttacctttacaaagtaatgttacgattcatattgaaggaacaagtacacaacaaacaggtggaactgcaacagtttatggtggacaatcattttatttaactgcaccactaaaaaacagtcctagtgattatgaaagtggagcgttaaacagttctgcaaaaggaaaattctgtgctctagccatcagttcaggaaacagtgccagtcaaacacatggatcatgggctcaagagtcggttgattcattaaaatattctgtcaactggttggattttggatatattgatcttcttaaaaaatcagccaatgaaaatatgacaaatggaaatacctgctatacgttggaaggtgctaaatatggtatttactcaggtgatactttagtaggtacacttataactgataaaaacggatatgctaaatcagatattctacctgttggtaaatatgttgttaaagaaaccaatgcaagtgcaggttatgatgttgatgaaggaagctacaacgtcacagttgtaaaagatcagactgtaactgcaaattcaaatgaaaaaccaaagaatgaccctatcggaattgaaatcgtaaaaaacgatgctgaaactttaggagaaccacaaggtgatgccacattagaagatgctgaatttacagtcaaattttataataaagaatatgacaaggataatcttccttctaaagcaactagaacttgggtgttaaaaacaaagaaacaggcaagtggtaaatatattgctggtcttgctaaatcatttttaaaagaaggatcagatgaactttactatgatgatgaaaacccatgcttacctttaggtacaatctcaattgaagaaacaaaggcaccaaaagggtatctgttaaaaggttacaaattaacagtaacggatactgcaacaggtaaagtaacatcagtaactgatggaaaatttgttgccaaaatcactaaagaatataaaggtgctaaattacaattcggtaatgatgcaaaccaaatggtggtacaagaaaaagttaagaaacaaaaagtaactatttttaaatcaggttatcgcaatggaatctctgaagttgttaaaggattacaaggcgctagttttacctttaagctcaagtcagaagttgatcatgtaggttgggatagtgcaaaagtctatgatgtcattaccacagatgaaaatggctgggctattacaaaggatttgccttatggagaatatttagtcagagaaactgtaacgccaaaggatttctatacgaatccagactttactgtttcaattacacaagatacaagtgaaatcaaaaaggatgaagataaggttaagaaagttatcttaaataaccgtccagccgaaacacaattaaaacttgttaaaaaggatcatgaaactggtaaaaatgtctcattaaattctgcatcttttaaaatcgtagcagacgaagatattttggaaggtggaaaagttgtctacaaaaaaggacagacaattactcaaaaagtgggcggtaaaaaatatgatacgtttacgacaaacagtaaaaatgtagtggttgttaaaactgaatatacaaatgatgacgatgacaaaggagaagtattccttccattacagttctttgctggtaagtatcatcttgaagaagtaaaagtaccagatggttttattggacttggaaaaactcaatcttttgaaatgagtggattattagatttttcgaaagatgaagatggtgatccaatctatacagtcacagttatagatgagcagcccaaaggttctgtccatttaacaaagacagtagatgatttagatactgatactgatttagtagaccgctcagatctttctaaaattcagtttgtattgaaggcaaaggatgacatctattcaccagtagatggatccttaatgtttgcaaaagacgaaaagattacaactgaaaattcaggagctgttgtcaatgtaggtactgaaattggaaaaggaatttatgctttatcaaaagatggtcaattagatatttcaaatcttcctatgggtacaggtgaagcaaaatactattttgaagaagtaaaaacacttgatggatgtgtattggatgaaactaaacatgcctttacattcaaacaaaaggattttacaactaaaaactacagtaaagagttaaatgttgaaaataaaacaacacattttaatttcaataaaacggatgtcacaggggataaggaagttgaaggagctcaattaacaattactgacgaaaaaggaaatgttattgatcattggatttcaactgacatgcctcattccattgaagggttagttgttggtaaaacatacactttatctgaaactgtttcagcaaaagattatgttaaagcaagtgatatcagattcactgttaaaaattcttcggaattagaaacagttacaatgaaggataaacaagtatcttttactaaaactgatgtgacaggtgaaaaagaagtcgaaggtgctacaattacagttaaagaaaaagaaacaggaaaagtaattgatgaatggacttctacaaaagaatctcatttcattaatggcttagaagaaggtaaaatatatgttttatctgaaacagtttctcctgaagaatatgtaaaatcgactgaaattgaatttacagtttcaaaagacaaagttgatcaaaaggtcaatatgaaagacaaacaggtcatcatttctaaaagtatggtaggtggcgatgaagtcattggagcatcaatgcaaattttagacgaagatggaaatattgttgacgaatggatctcagaaggaaaagaacattatgccagcaatttagaagaaggacattcttacacacttcatgaagatcttgttcctacaggtttaaatttagctaatgatactgtatttgcagtaactgaagaaaaagaaaatcaaaaagttgaaatgatcgatacaatcaatgaagtatcaaaagttaaagaagatggaacgctattaaaagatgctgagcttactgtagtttcagcaaaaacaaaacaaattgttgataaatggatcagtggacaacacatctttgatttaacagacgatatgaaatctcagttagctgaaaatggaaaagctgaaggaatgtatgttgatgatgaagattcaacttttatttatagtgtttcaaaaaataaagatgatttcagtttaatgactgttaaggatggtgttacaacttattcaaatatcgatttggatggtaatgaaacgactcacagaatcgaaggacttgttgcaggtgaaacttatattttaagagaaacgaagacacctgagggttatgctacttttgaagaacaagaattcgttgcagatgaagctaaggatacacttttaaaaatgacagatgaagatacaaaagtagaagtatctaaacaagatatcacaacgaaaaaagaattacctggtgcacacttaaaagtaacagatgaagaaggtaatacggttgatgaatgggtatctaaagaggaatctcatatcattaaaaatcttgtggctggtaagagttatactttaactgaaaccattgctccagcaaaatataaaattgctgaatcagttaattttaaagtagaagatacaggagctgtacaaaaagtagtcatgtatgatgaacttcttcctgaagctgctaaagttgttaaaacaggtgataatacaagagcaattggctatgccctaatgggtctaggatgttttgtgtttgctttacttattttcaaacacaaagatgaatgataaaatataaatatatgaaaaaggataggatagttcagtttattaaggaacttcttatccttttataaagaaaggaagacagaaaatgagtcaatatacaatgctcggcggttataaaattgatgttgaaacagaaccttatgataagggtagttttgatacagattattcaaaagctatacagctgacgattcgtttgagtgccaataattctcataaggaaaaaatggaatgttatttcatacaggcaaatgattatgcgactttttatgatatttgtgattctgttgatggcgatatgttagatatgtgctatgatgtaaaaaaatatattcagaatgctcatcatgtgtttttcaataacaatcaaattggttcgattgaaccgcaatttgatgggatgtatcatatgttattgatcgatgttattgagcaagaattcggataccatccagatgtgattgccagctttatgcataaggatacttgggatgagatgcaatatcttctagagtgtgcaggatatagaagacttgaaaataagaatctttgcgaagaaatcattcaggtaattttagttaatgataaagaaacatctgaaagtgatgaagaggttgaaagatttgaaggtattaaaaaacattaaaagatataagtattggatatttgttccattgaatctgtctttgatgatttctttaattacagtctatataaataatttgaaaaccggatttatgatattttttccagtagtgctatttctatacgagatagcactttttttattcattgtttcagttattttaaaaaaatttaggactgttactagaaaatacagagatgaattcaggaatgaattaaacaacacggcaaacttgccgtctgtaaaaaagtacaaggattttaaaggaggttcaaatgaataaattaagttttttaagggataaggtgatgattcatccaattgttggagcaatcaataaggctgaacttcaaaaatggatcaaaggttatacggatcctgttattgatattctcatctggcttattccaattggtgctgttcttgccagtcttgcaacattagcggtctggtttactaaagatgatgagcttaaagaacgtgaaaaacctagcagaattattaagaaaatagtcttctgggcttttgtggggactggtattgttgccatttttaaggcacttggaattacctcttcaggaattgggtgattgaatgtctaagattatcactgccattactcaatggtttagatcattattatgggcgattgctgaaatatttctttttttacttgattgtctgtggaaagttgtattaaaaattggttctttggatataggtggaagcagtattacatctaaattctttatattgatgtcagcatgtatgctaatttttattgtttttaaactgttaaaaatctatgttaagttttttgtagataatgagtatcgtgaaaacattaatctttcaaaaattctgatttcactctcacttgcttctatgcttatttcaggtgtgcccttaatttacaaatcagcatgttcaatgacaagtgatgctattgcacacgtcaactactggattccaagtgattttgcggatgaaaagaaaagtgcagaggatatgaatatgtcggatgtgctgattcagtcaggcagagtcaatctttcgaatcgtaataaggaattaagtgaagaaatcaaacttgatgaaaactttgatattaatgcaacaaaaacagaagaggactataaaaaggaattgctggataacatttcataccttgatgatgaaggaatgactagcgaaaatgctttgtctattgtttcaggtattacaggagtaatgggttggaacagtacagtctataagtattttcctacatggtcatctattatcttagaaattctgctttcaattgttgccctgtttatttttgcaatgacagcgttacaaattgccatgagatctgttatttgttcgatgaagtatctgttagccccttatatggttgctagcattattgatcccgaagataagagctttggaacgtgggtaagaagcatttcaggtgatctgattgctaacttttgccagatctattttacctattttgttttgatgctctgttccaatagcgcaattcaaaatacacttggaaatgactggataggtattttcagtaagattgctctatttataggtggactgcttgctgttcaggaaataccaaatgttatagcacagttctttggttcaagcggtcagtcgatgatggaaacattcagacagacgatgtttatgggttcagttttagctgaaccaaaacgaggtctttcagctttaaaaggtggtatccaaacaggagtagatgctggatttaaaggtgctgccaagattggaaatggatacaactcattaaaaggaatgaaagataccattcaaagtgcggacagtattcgtgacgggttaagcgatgtcggaaaattcaccatggacagtgtaaaaaataaagcagcaaataaaatgcaacagagcggttataaagggtattcttcagcaagccctaacagatcaaatgatttttcaagaaagtttgataaaggcaaggaaggacaaagttcaaacagtgatgtaaataaaagaaataacaatgaaggttctaggacaagtcaatcaaatccttttaatgatggtactggaatgacaatgggcatgaatggtacatcaccattgggttcggatctttctgctccatcttttgataatattgatttttcggattcatcggatttttcatacagttctggaatgtcatccaatatttctaatggaagtacttctggtacaaacagtacagattttaatccttcaaacagcagttatgggaatagtagcagtcaaagtaaaattgatccaatttacaatcaggaactggatgcagctaaatattacggcatcgaaaatgctaaaagtatgccacgtgaaaagcttcaaaaggaactggaaaatagaggttacagaactcaaactgtaagagaaaagaaaccttacacatttaaatcagcttatcagagaaatatggaaagaaacagaaggaggatgaagaaatgatatatagctgtcctaaggattttaaaaacggaaaatatttttttaataagtatggagttatggatcttttaatactagtgcctggtgttattgttggtactctgattgcgattgcttcaatttcaatgatgtctgatgaatcgtttaattattgtatggttctgtttattgttggtttaattattgactgtctcaatttcgttctgtttatgccaatgcctatgtttcataacttatttcaaagagtgatagttgaaattgactatcatttaagacagaaaagctatccatggtgtgggatcaattacaacaattatgaagaaaaggatgatgcggagaattaacgatgatgaaaatgagaagaggaaaaataaacaaagaaaaacagattttgaaggaacaaaaagataagaagaaaaaagaaaaggaacttcaaaaactgaagaaaaaagataagaatttaaagagcattcttgagtggatgcatattcaaaaagcagataattatggaatttatctgcaaaatcaggaaacagaaaaggttgtaagagggttgcagctgtcatgtcctaatatacttacaattcccgaaaggcagaagatccagatgattgttaatctttctagttgctttgacaattacagaggagaattgttttttaagatcgtaaagagtcctttgaaactgcacaaacatctgaacagatataccgaaaatctcaaaacagaagatgtttttggtcgaaagaaactgacggaacttcagattgataagatggatgatgctattcaagaacgtcatgaactggcattttatgtactcattcaggaaaatgaaaatgttgtagataaccgactttctaaactagatgccatgttacgctatgctggatttacaacatctttaatgtccattaccgactatgaggcagttatatcacatgattttaaaactgaaattgttaatcagtatgaatttgtttcactgatcattgacaaggagaaatatgaaaatgaaattgaaaagaactgaaaaggccagaagaacaacacttgcccctcatggacttgttgaaaaggacaattattatattattggcgataagtatgtaagagtattaacggtatctgctatgccaaaagcaattactgaaggttttcttgcacagtttatcagttcacctgattatcatatcgatttttcaacttctttaatgaatatagattttgcaagctatatgcaaaaggaaatcaatcatttagaggaacagattaataaaacgaatacagatacagcaagagaagaactgattaccagatattatacgatgcaggaaacaatcaaacagatggttgccaataaaagcagaaccatgaatgttgttattaatatttatatcactgctgatgatcttcaaaagctcaatgaaaaaacaattgcagtcaaaaacagaatccagacagataatcatatgagacttcataccttacctcgattgcaggtaggtgctatgcaaaaaaacagtccactatttattggcaattctttaaacaaatatgttgactatcacattggtgttatgttacctacacttacgggtgcagcattatggccatttttctatgacagtatcgatgataaatacggaactttcattggtgttgaagccaacacaggtgggaaaatcatctttgatcagtttgcttatctaaatgatactgaaaatgcaaaggcacagggaagaacggctggtaatatgctggttattggtaaaacaggcatggggaaaacagtatttatgacacttctaatatgttctcatatcattaaccatcgcaaagttatatggttagatcctgaaaataaaaacagggaactgacaagaaaacttgaaggaaattatattgaagtagggctgaataaaaatgttattaacatatttgatcttcagccagtatcaacagacgctgatgaaaaagaatcggaagaagtgatgtatgatacaaagattgctattaaaaatgttgttgaagacatgattattatgttcaaaacactgtggccaaatattacggaagatgaaatcaatgttcttgatgaaattacagaaaaaacatatagagtagttggaattgatggtacagaatcattcagatatttaaaaccagaagattatccaacgtttacgacattctcggtagtaattgatcagatgttggaagaatatgaaaacagttccttgaaaaataaaaaagtcattgaagcacttttaaatcttcaaatgaaaatgagaagtcttgtgggaactgctggaatagaaggacatctttcacgctatttcaatggaacgactaatataaatatggattcacttgatacgattggacttgtttcttttggaacaaagcatctgatgaatacaccagaacatatcagaaatgcactgttaagaattatttttaaatacgcatggtctaattgtctttcaacggatgagcagactgtatttgtgacagatgaagatcatacctatattcaaaatgaaccaattgcagctttaaaagctcagtttcaaagacgtgccagaaaatacaatacagtaactatcagtggaacacaggaagttaaagattataacaatgatagaattcaggttcatggggcagcgatttttaataatgcaacctatcgagtctatttcaatatggaactggatggtatttttgaacttggtaaacttgttcatctgacagatcaggaaatggatacgattcgttttctgcttcctcattattgcctgtttgaaaacggaaacagaaagataccagtgcatattttaatgtcggataaagaaaaagaattctttgggacataacaggtaaaaaatgaatcttattttaaaaagaataggaaaaaagtcaggaattattattcttggctttattttatttatgggtgcattgtgtacgccttttgttgccttaaatgagtggctggaacatccaatttcaactacagttgatattatctttggtgataacagttcatacagtctgaaggaaaatgtcaatgtaaaagtgttgaaatataaaagtgaagttgaaaaatggtgtccaaaggatatgaatggctattatgatgtttcaaactatgtaaatgttattttggcaatcatgatggttgaatcaggtggagaaggtaatgatcctatgcaatcttctgaatgttcaaaaaatacgaaatattctaagaaaccaaattcaatcaaagatccaaaatactctatagaatgtggagtcaaagattttgcggatgcactttcacaaagtgttacttcgggacttgttaataatgatgctttgtttactacagttgatgcctacaacaagggattaggcattatcaaaagacattcccaaaataaaaaatacagttttgaagagtcatgcagatattgttatgagcatcgttttaacaataataaaaaaggttattcaacggcttcaaagctgagattgatgtttaatttacagcctaatcagtattgggatggtggaaactggagatggaactatggaaatatgttttatgtttatcaggtactttcctatctgaatatttattctttcaacaatgatggaagtgctggagcaaatatcattaacattgcatcatcaaaaattggatgccgttactggtggggtaaaagtggcccagattattttgactgttcaggacttgtttactggacattgaatcaggcaggtattacagttccaagactgacagcagatggatttgcaaattacggaagaagcatatcggttaatgaactgaaggttggagatctgattgcttttgactggaatggagataagaaagcagatcatgtatcaatttatgcaggagataattacatgatacacgcaaatggaaatgcttctgtcaaaggaaattcttcaaaatatacagttaaaagacagaatatgacaaattactataaatcacatgtgttaagttgcagaagagtcttttgattacatcaaagtcaaaagacttttaatattttattactatttatataagattggagtgattacgatttttagcaaagaagaagaaaaatattttctgacattcgtattaaaatatgataacgattttgaaacaattttaggtgaaatgaaaaaaggtgcaaaaatcaattatgaggaagttgaaaaatatatgaaagatgtcgaagaaaaatatgtcatattgttttcaaatgactatccagagtattttagaaatttctctcagccaccatttgctctgttttacgagggaaatctagaattgttcaataataatggagcaacttttgaaaatcctttggattcaacaaaagatttctatctggcagtatcagaagatggtggaaatgaagtggactggtgtattgcggtcactcatgaagaagaccttttgccagtagttaataaatttttaaatgatttagaagaagatttagattttaaaaaatatgcgaataagaatgaattgaatttatcataattggaaaggaatgattttatggataattatacaatggatgaactgattttggcgtttgctttaaaatttgaaaataatgcacctgtaattttacaaagactttttgaaggaacaccagtatctgtagaagaaatcgatgagatactcaaaaaagtagaagaaaaatatgttgttattacatcagatgactaccctgatttttttcatagggtcgataatccatcatttgtatttttttatgaaggaaatcttgaattatttgatcaatgtgatcactattttgaaaaaacagtagatggaagaaaatgttaccttgcaatcaatcaaaaaggaaatgatgttgactggtgtatcgtgacagaaaatgaaaagcagttagtacctgaaatcaataaattttttgaagattacggcgatagatataatctgaagaattatgtaaaaaaagaggaattaagcttatcttaatgaaaaggaaaattaaaatgaatgataaatttacaagtgatgacattcttgttgcactctgtcagaagtttggaaacagtactgagattatagatgatgtaatcgataaaaaaatttttatgacagacaaggaaaaagaatattacttaaatgaagtgcatgaaaaatatatttcttttctttcagatgactaccccgttatacttgggggtcttgatgatccaccagtgtgtctgttttacgatggtgatcttgatgtatttcaaaaagatatacatgtttatgaaagtgttgttaataaagcagacaagatttttattggaatagttaataaaggtgatgaagcagaatggtgtgttgccactacagatcaagaagttcttcagcctgtagttgaagaagtatttgaaagaaatgataatttagagtttaaaaaatataaacagccccaaagcgctgtattgaattgatgaggtgaagatatgaaagaggacattacggatgatgaaattgtatttgctttagcaatgaaatatgacaatgatttagaaaaggtagcagatgcaatgatgaataacagagtcatggaagcggatgaattatttggatatataaacagtgcaactgaaaaatatgtaacacataactcatctgattatcctagagcattgaaagtagaaaataagccacctgttgtggttttctatgatggtaaattggatatttgtaataatgcagatctgttaatttttaatggattgtttggtactgaaaaaagaggatttttatttgcagccgaagatgaaaatggtgaatgtgattggatgattgggtgcgaaaatcaggaacatttgaatgacttaattgaaaaagtacaaagtgaattgaagatacttaattttaaagattactcaaaagaaaaagatttaactatgtcttaaaaaagaaaggaacagataatttctgtataaggtaaataaaaatgaaattagataaagaattagaaaatatattaaaacaaaaaggctataaaaaaatcgaatgtcctaatgaacaaaaagaaagtaaagactataaggatatgatgaaagctatagaagaatataaaaaggagatgaaatctaatgaaagaaagtaactccaaagaaaaacattttgaaaatataactatgaatgaaatacttgttgctttttctcaaaaatatcatggtcatttttttaaaattttagaagcattaaggaaaaaggaaagacttacaaataaagatatcaaactatatttggaagatgttgaagagatgaacgaaacaatcttatccgataaatatccttcaccacttaaagaaattcctaatccatcatttgtactctattatgaaggaaatctagaacttatggataaaaaaggaattcaaatatctttgcctgtagatgaggaaaactatcatagatgtttttttgctttagaagaaaataatggtcaaatggattattgcataggagtagaggatgaaagtgatttatcttttgtagttgaaaattttattgagcgtaatccacattataaatttgttgattattcaaaaagcaaagaaatggaaaattcgttggtataataatatgaatgattttaatgatataaatacaattattgaggattatccctttgatgaggataatccttttttaatggaaattccttcatatgagactgtttataggaaagatgagttgataaacaatgaaaatgaataaggcaagacagcaagttgtagaactatttattggctgtcttaataaaggaaagattccatggtatcagggatttatgccagcagaaccaagtttcaatcctataaccaataccgtttatcgtaacagcaatcgttttattctttatatgaacgagtatgttaatggttataaggatccacgttggatgactttcaatcaggcaagttcaaaaggatatcttataaaaaaaggaagtaaaggtgttcctatagagtactggagtctttatgataataaaaatagaaaatcaattaccagtgcggaagcaaaaagaattattgaagaagataaggaaagatcaaaagatatcacgtatatctgtcgagtttatactgtatttaacgcaacacagatggaaggtataccaccttataaaaatcagaataaaaatatagcatttgatgaagaaaagtatgaaatacctttatcagtaatgaatgacttttgtgagaatacagatttaaaaatgattgaagatgatggtgtaaatacaccatattatcaaccatcagaggataaagttgttgtacctgacaggcatcgttatatggatgaagaagcttttttctcggatacttttcatgaaatagcacattctactggacatgcaaaaagactgaaaagagatttaaaaagtagatacgaagaaaaagattatgctgttgaagaattaagagctgaaattggatcagcttttatatgcaacagtttaggaattgtttctaaaccaaacagagattatctggaaaacagtgttgcttatgttcagtcatttttgaatgtattaaataacaatccaaatgatctgtttaaagcgattaaagatgctgatggtatagcaaactatgttttagaaaaaggtaactttgagttaaaacataaattgggggagttatgtaaagaagtcattcaggaagataagtatgaaccaaacagtataacaatggatcagcttgaagaaagtctgaaaattaaaaatataccttgtctggatgaagaagaaacagcacatattattaatctttgggatgaagataaggaaagtattatgggacgtgttttttactgctttgatggagaaacaattacttgtgttgataatcgtgaaggtgatttgtttattgaaagatttgaagaaaaggatgcgttgcttgcatatatgtggatgacagacttaatgagttcaattgactgttatgaattgctgaataaaaaagaaggtgatgtattaagtgggcaacaataaaaagttaacacaggtgagagataatgtctgtattggaatgagttcatacggttgggtctgtaaaagagagtatgctcgattttatctgtgggaaaaggcaactcgctctggtaaaactatcagagaatgtttttataaacaagagattcctgttttcaactattcaatcaatgataattgaggaactacagcatgtaatacgcaagtggtacattttaaagatgaaaaaatggctaaaactcaacgttgttgagttgttcaacatgaaaatgtagcacatttgtgtaaacaaatgagttacgttttccttatcctgctaaatgtgtctgttattttctataatgatttcataaccatattctagttgttttgaagtataaaaattattcaaaaaatgatgcacggcagcattgccgtgtaaaaaggggtgagaaaatttaaatgaaggatacatggatcaacttcagaagtgatcagaatacaaaagagcgatttgaaaaattggtattgactactcataaaaacaaacaggaactgatgaatgatttaattgattcatatttgctattgaataatgatgaatataactcattagataaaaagatagcttatatgcttgaattgctgaatatcattaatgagtatgtgcagcttccagttaaaagctattgtaaagaattgccaaaagatatgacagagattgaaaaaattgtaaaagcgaaatcaagatatcatctggttatcatgaataaaattaacacggcaagtttgccgaccagatagttttttgacacaacagattatttactgtagaattttatttggacagttctttcattctaaacaccactttgaactgttcaaaatctaatggagcacggtagagtgctcttttatagtttataagatgtttttaaattatgggatcacaaaaatattgctatttaaaaatgaatattatatattaaatttaagaagaatagtattataatagataatataaagaaggagtgattacacatggaaaatagaaaaatgacatttgatggagttacttataactgctttacagatgaagaattagaagatttaaaaactgtaatcgcatatgaagaacgaaaaaagaataaaacatttgaaccaatagattttgatgattttttagaagagagagaaaagaaatatggggtcaaattttaaagttaaaatagatccttatgttattgccaaagttgatgatattgactattactattttgaaaaatttggcaattttgaaatgggaattctgttaacgaaagaattgaaagatgctaaagaaacaattcaagataatccctatattggaagaaggattgatgacaatatatacaagtatgtcatattgaatataaaaagtgttttatattatgaaattcatgaagatagcaatacaattattatttttgatttaaaagcgtttaaagaaaacaggagaaagaatgattaagttcattctttttttatttttctgttagacggcaaagttgccgtgtaagtatacaggaggaattttatggaatatgaggttgaagttattgaaactttaaaaagacaaaaggtaatagaagccgattctctcaatcaagcacttgaaaaacttcaggaagaatacaaaaactgtaatattattcttgatgaaaatgattttgttagggttgaatttagagaatcaacggatgaaatgatcaaagaaaatattaatacacaaaatctgttgcaggatttaatgaatgctggtggttgtgatgctagtgatgaatattcaaaaggatgggatgaagcaatggaagaagcttatagcattgtgtgtcgtcatctgaatatgacaaaagaaaaggtgaaagaagataatgccatcaagatcctttagagtctcagaaaagtttttgaaacagcttgaaatgattcaaaattattataagaacgaactaggattggatatgactcaaaaagaactgctggatgaaatgatagaactttaccattgcaggatcatgttaaaatctaacattcttgatgaattatttaaggaagaactgcgtaataatttgcagctttacatgattgaaaatgcaaagatgctcaatcacatcatagaaattataaagaaagaaggtaaatataaagatgataaatgagatagatccaaggatatataattttaaaaatcttaaattggaagatcaagtggttgttgcttcacagtttaagatttttttattagtcaaaaaagaaaaagaggatttaaaagaaacagcagataaacaaaattcattgactaagtttttttatgaagttgctattgaagaacttgatgaagtagaagaaaaaatcaaagatacaattatacagacaataattagctttattgaaaattatgattattttgttaaagaattagaaacagatgattatttttatggattggaggattcaaaagatgaataaacagtttgatgtctttgtaaaaatgaaaattactgagatgagtaagactattcatgatatgacttatacgtatattaatcccgaaacaaaaaaaccaactgatgttccagcaaaacattatcaggatatattgaaacagccagtagaagtcatggtggaagaacaggtcaaaaagcagtttctgaatattatgtttaaacagttgaaaaacttaaaggaagaggaaccacatctgttttatcaatcattattgttaatggatattggtaaatcaccagattcactagcggtcaatgaagaagttgcattaaagatgacagctgattatatggttgatgaagaaaacaaacccaaaaagaaaaatgaaccaaagtttcatatttctcaagattcttttataaaaaaatatgatgatataaaaaatgatgattcaattatggcagaattgtttgaatcagctgatgtaaaagatgatggtttcagccttaattaaattctttagacggcaacattgccgtgtgaaaataggcactatttctatcgggtatttataaattagtttcaaaaaaatgttataattattttggctatttcaacataaagattttttcatagtatgttgtttgtaacagatattttattgatgagcaggtgatagagttatgtggttgaatttgtgtccacaaggtgtatttttcagtattaaaattgaagattatttaccagttaaaaatggaaaaatgtattctaatgttaattggacaaaggtatcatgtaaaattaaatgtggagattttataaattactcagcaaatagagaagaaatttttttcagtgttgaagtggatgagtttaaaagctatctgaaagattacttaaaatttgaacttgatgaagacatacgtggatattcatttactgaaccatatttggatattgatttttggacattttctaaggaattatggatgaatattaatatcagaataataaataaagataatgaattgacacgacattatttcaaagtaagtttatctaatgaagatgttaattatttatatctttatctgtgcttgattacaaatgaaatatcagaaaatgatcatcgaattagagaaatgataaataagaaaattattactgaaaagacagttttagattaaagtaaagtatgttgctttactttttttactttctactaaaaaggagatgaagacggcaatgttgccgtgtaatttaaaaatagaatatgaaaataacaaaagcacgttttatggtgaacggttataaaccaccttctaattctagaatgaagaaagaagtatctatggattctatttcagggtattttgaatatacaggaagggatgaagcgaaagatgttgaaaaagatgttgaagaaaatgaaacaggttattttggttatacaggaagtcatacagttggaacatctagttcaatgggggtgttaaatacacgagaagacaggaaaaaattcaaaaaggaaataaaaaaatattttaataaaaaaggtaatatctgttgggatctggttatttcactggaaagtgatgaggaagcagcaaaactgggtcttgaaacggttgataactggaatggtgtcatgtctgatgcacttttaaaaatatttaaacagtatgatttagaatataataatgttctatggtggtttgatgttcatcgaaatacggaacatccacatattcatttggcttttatggaaaagcatcagacaagattcaaaggtaaaatatcaaaagcaaaactggaaaatgtaaaaaaatctatttatacatgtattgcagcaagacaaaagtttgctgaaaaaacaggatatgattacagagagtattttaaaatcaaggatcaggaatttaatcagcttgtaacacttattaaagggaaagatttatcaaacgtgaaaacattaaatcagttgctggatgctttgcccaaaacgggaagatttcaatataattcctataacatgaaagatttcaaacctgtcattgacgaaattattgatgaaattatttttaacagtcctgatttgaaaaaacaatatgacattttattagaaagaattgatgttttagaaggagttatgaatgacgaatcagctggtatttcaacattgaaagaagcagagttaaagaaactgcatgaaagaattggaaactatattttaaaaaattataaaaaaactgaaaaggtaaaggtgaagaaggagacaaaaacaataaggaaagttagatatcttaatgaaaaaagactggaaggatttatttacagtgttgctttagaacagcaaaatagcataaataaatccatagatgagtactataaacgtatggaaaacaatctaatcgtctgatgcttctatatcttcaatatcattagttaaatcaaatacaggtttatgtaaaacgtcaaatagcttttcattatactcattaagctttgaaatattatgactcaactgatcacataaaaatgctttagaagcttttccttgaccatcgacaaacgaagtaagtgtttctaaatccatactgtaaagggtctggtatattccattcaatgtataagctattttatctatttcatcatagacttcaaatattatttttctttcatccattttgcattcctccttatacatttaattatgatgtaaatttcttttgaaaagaagaaatcctgcataaaatacagaaaatatgacttaaaaacacaaatatcaaaaaattaacaagaattgttagcaatagagtataattattttatagaatattaaacaatgaaaataaaggtgagattatggataaggtagagattttagaggatgtttcaaaaaatattttgaaaaataatattaatggggccaaacgaataattgaaacagaatatccatttaaaaaaccaatagtaaaaattcgaaagtatacagataaggaaaaaatggagcagtttgtaaaagatggatttatagatcgttacagtggccaaaaactggtaaatccaggattactaaaggtattatcttactatatgcctgatgtgtttccatatcattcgcattggaaaatggaaaattgtcataacgcttattgggaactagtgccaacacttgatcatatatttccaattgctttaggtggtagtgatgataaagaaaactggacgacaacttcaatgcttcacaattcgattaaaagtaattggacattgaagcaacttaactggaaattgtatgaatcaggtgattttaaagtttatgatggattgacaagtctatttgttcaattggtggaagcagatgaagcacttcttaatgattcttatatatatcgttggtatcatttatcaataaaattttttgatgatgaggagaatcaattatgaagttagtctgccctaaatgtaagtctaaaaatattattcctattgtgtatggttatccatcatcagaattatttgaattaagtggacaaggcaaagtcaaattgggtggatgtgaaagagtatttggctatatgcaatcgaacagatactgtaaggattgttgttatgattggcatgttgataatcttaaatgtgatgatgtaaaaaaagtacgttttaaattctggaaaaatttctgttgtgagaactctaaagaagaaaatcaatgggcttatgatatatattcaaatggcaaaattaagtattgttcctatcctgtaaacagcaaaaatataattaacaaagttgaatcttctattgatgcattgaaagtcaaagagttttatgatgatttgctgtttcagttcaaaccatggagctatgcaatagaaaacacagtagaggatggatgcagttatgaactggtgataacttataccagtaatcagacaaaaaaacacactggggacatttcaggtggttcaatagagagtcttgtattagattttctgttaacagttcctgatctcaataaaacaataaaataataacaaactggagtaaacgattttacgtcagtttttctatatatgaagaggtgattcaaataaataacagaataaaatacgcctttttaacaggtctacttttttcaatatttacagcaatgcagatttcctataatctttcaaatacaggaataacattcaatccactgtttgcttttgataacttatatctattattaggctgtattgcttttggaatgattcctgcaattatgctaattttaaacaatcttgaaaccctaggaaaagataaccgaaattattctaaacttgtaaatgttaattactttaaagaaaactttaataaaatcattttcaatcaaaatgcagaaatagttgaaaacagacaactgtttttgaccaatgatataagaactcagatcaatatatggacaaaagaacataaacttgagtttttaaaaataccactttctaaacaaaatttaggatttggtattttttttgttacagggaaaaattacgtgtatgttgataatgcggatcatcatactctgattattggtacaactggttcaggtaaatctttcagctttatacttccaatgttatgtctacttgctatgacaggagaatcaggattatgtgttgatatcaagggtgaattaagtcaggcaacagcagaactttttaaaagtaaaggatacagagtttattttcttgattttatcgaaccacaaaacagtgactgctggaatcctttgtacttgggatctcacgaatatatgaaacaacttaagactaaaaatgagcaggaaaattatttgaaaaataagcttgaaaagggaaaagaagagtttgaaatattacatggcaatgttgccgtgtttgatggtaaagagtttataggtagaaatgaagcaggtgattatatttataatgaagaaaacaactcatttttgactgatgctgatttttcacaagcgcaggagtatcttcgtgatgtagtacaggcaataacagaaggaaagaaacagggacaggatcaggagttttggaatcaggaagcagggagaattctggaaggttatgttcatttgctatgtgaaacaggcaatataaacgttgttaatataccagcggtcaataagttaatgttggatggtgatgaagttaaaagaaaaacaacgcgatcagaaattacttttcttcagtattatttaaaaaactataaaacaaattttgatatttcaaaagagcgattgtcttcgtatgtagacagcgctgaacagacaagaaaatcatcacgtaatgttttaacgaaacatcttacatccatcgtaacaaatgatgcaattaaaaaaattctttctaataacacaattgatttggaaaatattgattcctataaaacaatgatttttttgaaagtacatgatgaaaagcagacgtattatcctttggttactttgtttattaaacagctttggcaatgtcttgttaaagaaaccagaaagaactcaaatttgagattgaaacatccttttaacatattgttcgatgaaatgggacagtttcctaagtttcaggaaattacaaatattcttactgctggacgttcaagaggtgtaaggatgaacatggttgttcagggatttgatcaacttgaatctgcctatggaaaaaatgaagcacagacaatacgatctaatgcaaccaatcttgtttatttgctttcaaaagattatcagactttagaggaaatttcaaaaacattgggaactaagaagacatctaaagctaaagaagaaagagttgttacagttgatcgtctgaaaaactttaagcttggagaagtactgattatgggagatagaggaaaatccttaattactaacgtattgccttttaataaatataactattataagaatttaaaaaaatacaacgtaagggacattcctaaaaaagaaccaaaatattttgatattaaaaaagaaatagaaatgagggaaaatatgaatgaacagtaaaataaaaacttatcttatttcaaaggggattgatttttcagtcccttttttagtagatgaaaatcatctggaaaaaattgatgaaaaatatatttatcagaatacatgttttgaaaataaattaattaaatatacaatgcttggaaaaaagaaagaactgtttttaagaaactgtaagattgaagcaacaagtctgtcaagtttagatattaaagaaagaatagtctttcataactgtatatttgacaatgttaaaatttccaaatgtaattttaaaaatgctgtcttttataactgcaggtttaataattcagtaattgtaaattcaatactggcaaacagttattttattaactgtaaaggaattgagacagttgattttatggaaaataatatgcaggatgtctcagtaattggtagcaaagttaatttaaatgagctggtagaaaaacaaaacagatttgaagatattttaattcaagaagaaatgcttgaagttcaacatggcaatgttgccgtgttggaagaaaaaaaggaagatgatcaggaaatgaaagaagaaaatgaaagacaaattataaaaaatgaaatctatagcagtcaggaattgtcacaagattttttaaataataagcttttttataaatgccattttgtagattgttctgtaagtgataatgtaaaattgaatgctacaacagactttaaagagtgtacttttttaaacaatgctcttcattttgatgatgttgacaaaacatcgtttgatgactgtatctttgaaaaagtttctcttaaaggaaattttatacatgtatcctttgctggatcaaagtttagcaatctatcttttattagagattctacatttgttgcctgtttgtttgatcatacaaacgctgctgaatattttgataataatttgataaagctaagcaatattgaacttgttaaaaaatcaaacgataatactgaaatattgaaaaaagtaaatgaactttatgaaatattaaaatcaaaagatagggtattacagcaggaactgatagcaaaaacaaaagtggatgaggaagatgttcttgattatattttacatttggatgatatggaatacttaaaactgattgcaaaaacgagtaatcgagtagttgaagaaaagatggtttagatgtcaaaaaaattagatgaattatttgaaacatatgcctatgatgcaagacaaaaaacacagcttcgtttagctgatgaaaagggacttgatatttctaaaatgaaagatccaaaatttaactgggagcagatgcgagaaatttcattagcaatggaatatggactgaaacctgatactttatgtgatcctgaaatcaatgctgaatctatggagaagattcgatatagtctgatggatcagcaaagtgtttttgaagatgcaaaagaagaagttaaaaagaaacgtattaaaagaatttctttaatcatttttactgtaatagttggttttattgtaagtattatctatttgatgaataaggatacaatcgataagtatatcgagcctgttcctctagaattaacaacagatagagtaactgttgaatatggtgaagatattcatttcatggattatgtaaagtattacgacaaatcacagcaattaacaatacctttgaatcagaagttaaaaaagataaaggattacaagtttatttattctgttacgaatggtgttaaaacaaaagaaaaaacattgatagttagtgttgttgataatataaaaccaacaattgaattgatacaaagtgaaattactcttaataatggagaacagtttaatccaaaagattatataaaaaaagcagaggacaattatgatcagttatcagctgataatgttgtaatagataattcagttgattctaataaggatggtgattatgaagtcgaatatcagttagaagatcaacacggcaatgttgccatatctactttaatagttcacattagaacagtacctcaaaccgaagataatactgctgttagaaataaagaagattcaacggttaaaaagaatcaggaacagagggataaatcaaacaaagtagaaacacctaagacaataaatgttgaaccgaagatattttatataaaagattacaactatgatttatcagcatgtagtcaagcggcaagcaattatatgaatcaagtattgaatagtagcaatattaatataaatggttatatagaaccgtatcaggaaaatggtggaattgttggatatactgtcttatttaagtaaaattttaatgattttttgattatttaatcttaatagtatgccttatctttcataatatgtaattggtatatttaaattaaaaatgtatgaaaaaaatgcatgatagtactcatttgattaaacatattttataaaaaatgttattatatttatataatttattttttaattatcttatcacaaatcataaattatattgattaaatcaacagaaaagtattgttatgacaaattaatagtagtattatataggtaaggaaatagcatttaattaattgaaaaaagtaatatagtttttatgatattacatttaaatgatatcttatctgaataacactaaagaaactgctagaaaaattgatttagaagaactaaaagaattatctgtagttggtggggatgataatggtggaaatgtttccctatattcaataaagactagcttaattactcttacagttattacgatttcaattacaagtacattctcagttggtgaagcttgcagttggccatgataagttagacatgtaataaacaataaaacaatgattttataaaaggtcaagtcgcaataaaacatgtgatttgattttttataaatagaagggagacttctatgtggcatatatcttttatgggtaataaaaaaatcaagaattcaaaaatgacgttttacccaaaaattcaaaaaaaataacaaataattctttttggatcaatgggaaatttttttcttttattctaatagcaactataatttcatttacattttataatttttttacccacccaattaaaaaccattctataatagaactaatattatgcattataataggtattatatttttgattcctatatttttagtacacgaaatattgcatgcaatttggtttccaaaaaaagcaaaaaaagagttatggtatgaaattaatagaaattcactatttttattttcttttcaaatatattcgaattgcccattaaaaagaaatagatttttattaatgcttctatttccaaatatcatattagcattaataccattatttctttggtattgtggtatcgtatttatttcaccatttatatcaagaattataggtagtcttttaacgatattatttacttgtggagcatctgattattcattattttttgatactgttttatgcacaaaaaaagaagataatataataatttttaaaaatgaattttattcaagtaatactacttgaataaaattccatatctagtaactttcttgcaatacgatttttattatcttcttatttattgtattgaggctgtaacgggtaaataactcattatagtttcataaacagtaaaaggcggaccgaagtccgccttttatggtacattaattctaccatgaaaacataccaacaagattatacggcatatcagacatatgcgctactagattttaatatttcttttgaaaaagatgtaactgctgatgatatttcaagaactgtgattgaagttacggaaaggatagatataaacaagtttgttgccttcactcatagaaattctcacgggtatgatggtctcatgatgctcagactgcttctgcttgcttttgcggataatggttatgcatctacaagaaagcttgcagaactatgcagaactgacatcagatatatgttcatcgcacagaatcagaagccttctcatcaggcatttcagagattcatccatgatgatctcattatgtccgttgaagaaattttctatgaaatgaacagaatcatggatgatgagcttcctatcgatacagatgtattatgcattgacggtactaagtatgaagccaatgccaacaagaacacattcatatggagaaaaaatactgtcagacatagggaaatttgaaacagtatggaattaaagaactaaaagaattaagaaatgtatttaatgaagaaatggaaagtaaaataaaaagcagactaatctatatgcgaaatcttaaagaattaaatgaaagacttcaggaaagtgaaaagcttggcgaagtagtcaaacgaagaggaaatcaatatataaaagaagactggaatggatttataattcaaggattggttgaagagttataaatggagtttcttgtaatatcactaaaagaacttgtatttaaaagttttgcttcaccgtccattgctcgcatcgatacttgatggtatgtccaattttcaacgtgcaagaaacagaatcctatattctcaaaacaaatatgaaacttacacaatgaatgaacatacagacagaataaaacgtataggaaatcctagaggagcctacaaaaaataaaataaaaatagaaaacaaataaaaggaggaaaaccaggaccagacatcatcctaattttcctattaaaaaagcactgaatattttagagggaatactgattccacatcaatatcacccccctaataatttagagcgtcaaaaaaacttcatttttttaaaatataaatcttattatcttcttgataaaaaagttcgttatttctcatttttaacaatataacaataaaaaaatatatatcacttgccgacattgctaagcttgaaaagccaaaaaaaataagaaaagtcattagaatcaatttttttataatgaatgataaaaaaataggaataattgccaagacaagcgtcggagatattaacattattagagttctacacttactcatcttcgcatcactttcaacagatattatcggttgtaagttcttcattttgaatattattttttttctactttttttcggatatgatagcaaatgtatatattcatgtacaatactaaaagggaaaacagaaataagcacggctccaaatgcagaaaaaaacaagcctatatcattaatataaaatcttttaatctttaaaaaaaataccaatagtagcaatgtacataacacaatgatcaacatactaatattttctgtttttttgtttattttaagtattttaaaatttctattatcataaaacttttctaccatacacataaatcctttctactcatctatacgaacttggagtagcgattcgaatagacgcgggaatacgtccaattaactagcactgctctggactagtagtaaaatatgaaatagacactaatgatactaaaacagtcgtaatgataacgttagaaataaaacatctgggttctggatttccatcattaccaccaacaattgataattcattcaattcttcaacgataacttttatctttgtattctattccatagttttttccttggtttcatcatgaacctattccctagtactattatacaattctatgagtatttaatctatctaaagacataaattatgtcgtaattttgcaaatttgtaaacgttcatcttttttgttccgattatatgtgtaaaatgtatcttttttgcaaaatttccctaaaaaagcaaaagaaggcaaattggaagaaaccaatcattgtgtatgctgtttacaaggatgttttggagaagcgatgaagggcaacttcacttgtttagtaaatcctagatgtacaagagaatttgaacatgatttattaaaagctgataatacaaaaaatgttatgattattggtgctggtccaggtggattgatggcagctcgtactgcagctcaaagaggtcataatgtaacggtttatgataaagatacacattttggtggagtatttagaagtgctgcctatccaatgggaaaaggagaactttctactgtaatttctgcttatagaaaacaatgtgaagtattaggtgtcatatttaaaatgggtcaagaagtatctgaagatacaattaaagaagctagaccagatacgattgttgtagcaactggttcagtaccattaacgccaccaattgaaggtatcaattcagaaaacgttgtaactgctgaagatgttctttatggtaaaaaagatgtcaatcaaggaccagttgttgtttgtggtggtggagaattaggtggagaaactgctgaattcattgcacaaacaaatcatgatgtcactattttagaaatgaaaccagctattttaactgatatggtagtaactaacatgattccaactatggaaagattacaccaacaacaaattaaaattgttacaaatgcaacagtaagtaaaattaatgaaaatgctgtttcatataaaaatgctgatggtgacgaaattactattccagcctcaacagttgtttcagcatttggatacaaagcttataatccattagaaaacgtagcaaaagaaaactgtaatgaagtttacgtaattggtagtgctgtaaaagcaggaaatgcattaactgccattcaagatggttaccaagctggattaaaattataataaattaaaagagatgatacggtttattgccgatcatctcctttttagtatgaaagtatttttgaatgacttttctattatacaaaatcttttcttacaaataatacttttcctattatctgtatatttcgtctttcaatttcttcttgatcaaagtatctgtcttcgtattttaaattgcttgcagccaatataagaatattatttttaaagtatactgtttttattgttacttcttcatcaatcattacaacggctatatcgccagtgttgactttattgcattcataagaattaacaatgggcagtttccaaaagtgaccttattccgataaaaatccaatatagcacaaaagagtatcaatctcctaatacaacggagactgatactcttttcttttttcagattattctattctgaagaaaccttcaatcaatcaacaagatagctcaaaaaacaagaaaagccgaagttagtgtgacaacccgacctcgacttttcgcaaaattattgatttaacgagaaaagagcagttgactccgattttattcagttttcaatattcggaatgacggcacttttacgttacactgacggtcatgcgcacttagaaagaaggctcatacaggtacgcttacgctccatatcggaatgaatgtagcggttaagcgtgacttctacggagctatgccctaaaatctcggacagcgttttcacatcaaagcccagttcgacacaccttgttgcaaataaatggcgcaggctgtgatagtggaatgacggcaaatctgcgttatgcagtattttagcgaagcggtactgcattgttcttggctcaacaggctttttcctgccggacaccacatagacctcaccgttatccttaaaccgtctgagcagaggaagcaggcaatcagggataggaattgttcgtttagaactttcgcttttcggctcagtgatgatgagcttggtttgtttggatcctgttctgcactgcacacgctgaatggtcttgctgacggtcaaaacacgtttttcaaggtcaatctctttccattgcagagcgcagacctcaccgatacgcaagcccatatacatcgagattgcaatacccacgctcgtaacagacggacgctcgtccagatatttttcaagcctgagctgctgtttcttgttcataacagcaatttcaggcttattctttttggggagaacgataccgtcaagtacgttacggattctatattcacggcttgcatagcgaaaaaccgacttgaacagcacgataatatcagacagataccgcaccgacaagccctcttttatcttgcgttcgataaaagcatatatatctttcgctttcagcagacagcactttatctctccaaatgcaggtataaggtgcttttcggctttcatgacgtagttggcagccgttgactcctttattcgtgatgctgtcacatgaagccactcggtcacaagctctctgaccgtcatttccgttacagcgtactcgtcctcgctgtgatccagtgctatcatagccttgtattcggcttcatcacggctttttccgtagaacgaacggaatacacgtctgccgttctcatctttgcccatagatatacggcactcccagcgtccgtccctgcgtttataagctgttttcttgctcattcattaaaacctccaattaatcatcgttcagtataagtaattatggaaacaataaaaaaacaatccacctatcttgacaagacatacataatttgctataataatgataaggtatattagaaactgtgtgagaaacatacgaatcaagtttagcgtatcgtcaattcaataattttgcgaaatacgaagctgtattttgcagtatgttaatgactgttaaggaggagtaatataatggatgcaaaccagaatttgacagcggaaatgattaaaatagacccctataattatacactatccgagatggtggatgtaattggggaaaccgaagcaaaaaagctgtttaaatctatttataaaggcacatcgaaattaagttatcaaactataaaggtgaaagatgtttttaatggtggcgacacaagaaaatatgcgttcgaattatgtgaccattattgcattgaaactgtttgtattcaaagaagaaccggtactacagtgtgtgtaagtacaatggtaggatgtcccgttggatgtgttttctgcgaatctgggaaaaacggttttatccgtaacttaactccatccgaaattgttcagcagattgtactacttagagaaaaagtcaatcgaattgtttttatggggatgggtgaaccactgttcaattatgataatctggttaaggcgatacatattctacgtgatagggatggattgaattttcctacagatggaatcacaatttcaacagtcgggccgctacagcaacttaaaaaaataagagaagaacatttgaaaatacagttgactctctcgcttcacgcaacagatcagagaactcgtgacattgtcatgccccatatgaaaggacatgatattagaaaagttgtggaaaccgtactttcttattccgaaaggcacaacagaaaagtcactatagcgtatttgcttattccggggttaaatgatcgttcaagcgatgtaagacagttaggaaagtggtttagaggaaagaatgtgttgattaatcttcttcagtataacgaaacatcgaatagtcgcattaaacgtccaaacaagcagcagttagttgcgtttaaaacaagattggaggatgctggcttagaggttaagcttagagagtcccgtggaaatagaatcaaagcagcttgtggacaactagttagcgaatacaacaggcagggaaagaaaacagcaaatcggactgtaaatggaactgagaattcaaacggaagcgtgcgaaaatcttcatttacaggaagagcaagttcgaagagacatccttttgcaaaacacaaaaatgttgggaaaaagagaaagcatgagtaagctagaactttataatatatatgctggttatgaagagagcaagcctgttcttaaagatatttctttttttgtagagaagggtgagttcatagtccttctaggaacatcagggtgtggaaagaccactatattgaatctcatcgctgggatgattccaatatcagctggagaattatacatagatggggttaaatcaaatgatactccacctcgaaagcgaaacatagccatggtgtttcaaaactatgcattataccctacaatgacggcatatgaaaatattgcttttccattacaaaatgctcattataaaaaaaaggatatcgactcgtctgtcaagagcatcgccgttgaattagggatcgatgaccttaccaaatattatatggagtaaaaataagcctaaaggctatgataaatatgtaaaaaatgaaaataaagtattactactattggagtggcttggagaaatgctagtaacctgtctgtcattgatatttagtgattttaatataaataaaatatcaaactggtctagtatattgttaattgcctttattataatgattttatacgaaatatattggataagatattttaaaagtaataaaacaatgaaagatatgtatagtagcttgttaggaataccagttgcaggagctactttgccagtagttgcatttctgttactaggtatatatggtagaaatatatttcttattatatcaacaatagtattaggaataggacatataggaatacacttaaatcataaaaaagaattagaataagaaattacaattttatagttattgatttatagtaatttaccgaaaagattgtcagtatgatatgaaccccgtttcttggacatagaaacggggtttttatatgtcaaaattaagttatgaagataaagtaaatttatataatgataagataaaaggaatagcaataaaatcattaggtcctaaatatggcattacgtatcataatgcacaatatttgataagattaattgataagcatggatttgatattttaagaactacaaagaacaagacttattcctcttttgaaaaagaaagaataattaatagagttttattaaataatgaatcaattatgtcagtatcaataaatgaaggattacctagtgatggaatgttatgcaattggattttaaaatataaagaaaacggttataatatagttgaacgaaagcgagggcgtccaactatgccaaaagtaacaaagaaaaaagaaaatgaaacagataaagaaaagataaaaagattagaagaagaaaatttatatttaaaagcagagctagaatactcaaaaaaattgagagccgttgttcaagcaaggaagaatcaacaacagaagaaaaagtaaatgttgttagtgaacttcggctaatatatccattagcgattcttctaaaagtatctggtttggctaaatcagtatattattatactttatctaaaatagataaagatgataaaaataaggaaataatagataaaataaaagaaatatttattaataataaagaaagatatggttatcgtagaattacattagaattaagaaatcaaggttataatgttaataataaaaaagtctacagaataatggttaaactaggattaaaaccattgaaaagaaataaaagaaaatattcatcttataaaggaactgttggtaaaattgctgataatttaatcgagcgtgattttaacgcagataaacctaacaaaaaatggtatacagatgttacagagtttaatttaagaggagaaaaaatttatttgtcgcccatattagatggatttaatggtgaagtaatatcttataacacttctaaatctcctaatctagaacaaataaatgatatgcttaacaaagcatttgatggtagaagtttagaaggtttaatatttcattcagatcaaggatggcaatatcagcatcaatcttatcagcaacgattaaaaaataaaggaattaaacaaagtatgtctaggaaaggaaatagcatggataatggaatgatggaaaacttctttggacttttaaaaacggaaatgttttatgatcaagaagataaatataaaaatatagatgaattaattgtagcaatagatgactatattaattattataattatgatagaattaaggtaaaactaaaaggactgtctcctgtaaattacaggttacaatcctctaattagaaactatttataaactgtccaacttttggggttcagttcagtaatgacagtcttttttgtacgacaagcagttatacaaatagattagttcagtgcaactaatctattttttataattttataagaattataaacgaattaaatgcaattatttttttattatttattgacatttaattataactactataaaatatagtagtatagtttgtagtagaaagaagggcttaaatatatgaaaaattatgacaactattttcttcctgtagataatatggaagaagcaaaaagatattatgaggaaatattggggttaaaaaagaaatttgatttttctgataagggaatggttgcttataatattggaaatgaagaacctgcaataattttaaaagacaaaaataaatttgagaatttaaagcctacaatatggtttgaagtagaagatgttgcaatcttctataaagaaatgttgaataatggtataaaatttttgagtgagccttttaaaattggaactggtaatgcagtcgagtttgaagatccatttggaaatagacttggcgttacagattatattaagtaaggagtagagattatgtcaaatatagatttggtattattaggacttattaaacaaaaatcacaaagtgcttatgatattaaaaaaaatatagaatatcgtaatataccaagatgggtaagaattagtgaacagtctatttataagaaagtattacaattagaatcaaaagaatatattgttagccataaagagaaagagggaaatatgccagataaagcagtatatactattactgacaaaggtaatgattattttaatagacttatgaatgatatttcaaattatgatgttagtctatatttggattttaatattattattacgaatttagatttagtagatgatgaacaaaaaaagattcttgtttctaatataaaatcaaagatattagaattaaaagaattgctaaatgaaagacaatctcatagacaacatattcctaatgttggaaaacaaatgttcaaacaacaattagcattagtagaaacattagaaaagtggataattgattttgagaatagtttaaaaggacaaaattagcaaatattgattttaagttaaaagataaatttgtagggagggaaattccatgaaaataatcaacattggtattcttgctcatgtagatgcaggaaagacgactttaacggaaagtctgctttatacaagtggagcgattttagaattaggcagtgtagataagggaacaacaaggacagatactatgtttttagaacgtcagcgtggaatcacaattcaggcagcagttacttcttttaattggaatgactacaaaatcaatattgtagatactcctggacatacagattttataacagaagtgtatcgttccttatctgttcttgatggagctattttagtaatttctgctaaagatggtgtacaagcacaaacaagaatactattccatgcacttcaaaaaatgaatataccaacaattatttttataaataaaatagatcagtatggaattaacttaaataatatttatcaaaatatcaaagaaaaactttcaaatgatattattgttatgcaaaatgtaacattaactccagaaatatcaattaaaaatatcattgatttagatgaatgggatcctgtaatttccaaaaatgataaacttttaaaaaaatatattgcaggagaaaaattgactatacaggaattaacgcaggaagaatataggtgtgttaaaaaaggttcgttgtttcctatataccatggaagtgctaaaaataatataggaactcaacaactcattgaagctatttcaaatcttttttgtcctgaaatgaataagaattattcagaactatgtggaagagtttttaaaattgaatatacagaccataagcaaagattagtttatttgcgtctttacagtggaacattacacttacgagatacaattgtattgtcagaaaaaaagaaagtgaaacttacagaaatatatattccttcaaatggagaaatgatacagacagaaatagtttgttctggagatatttttataatacctaacaatacattaagattgaacgatattataggaaatgaaaagattttgccatgcaatgtatggaatgacaagcctgtaccaatgctacgaacaagaattgaaccgataaaaatagaagagagagaaaaattattggatgctcttacagaaattgcagatactgatcctcttttacgttattgtgttgatacgataacacatgaaatcgtcatttcttttttaggaacagtgcagttagaagttatctgttctctgttgattgaaaaatatcacataaacataagaatcgaagatccaaccgtaatttatttggaaaagccattacaaaaggcagattatactattcatattgaagtaccaccaaatccattttgggcatcaattggattatcaataactccacttccaattggcagtggaatacagtacgaaagcaaagtttcactcggttatttaaatcaaagtttccaaaatgcagtaagagaaggtattaattatggactggagcaaggtttgtatggctgggaagtaacagattgtaaaatatgttttgaatatggtgtttattatagccctgttagtactccctcggattttcgttttcttgccccaattgtacttgaacaaacattgaaaaaagcgggaacgcaattattagagccatatctttcgtttatactttttacaccacagggatacctttctcgtgcatataatgatgcacaaaaacattgtgcaataattgaaactagtcaatcaaaaaatgatgaaattatttttacaggacatattcctgtacgttgtattaatgaatatcgtaatactttaactctatatacaaatgggcaagcagtttttttgacagaattaaaagattatcaaattgctacttgtgaaccagttattcaatcacgtagaccaaataatcgaatagataaagtacgccatatgtttaataaaaaagaaaattaagttactattcgctaaattacaatttatagggtaaagataataggagccgaaaggctcttatttttgtgcctttaaatcctattcacttacaaaacttttcttattatatatgttaaatcgtattcactctaaaaagtttgttgtattaagaatggtgtcgtgatagatcctgcatgtggtactagcggatttttagttacagcaagcgattatttaagagaaaattacaaaaatgatattcttatgaatagacaaaaacgagatcattacatgaatcatatgttccatggatttgatatggatagaacaatgttgcgtattggagctatgaatatgatgactcatggagttgaatcacctaatattgaatatagagatagtttgtcagatcaaaatgatgataatgaaaaatattcattaattttagcaaatccaccttttaaaggaactttagattatgattcagtatctgctgatttattaaaagtagctaaaacaaagaaaacagaactattatttttggcactttttataagaatgttaaaaactggtggaagatgtgcatgtattgttccagatggagttttattcggatctagtaaagcacataaagcaataagaaaagcaataattgaagacaataggttggaggctgttatctcaatgccttcaggagtctttaaaccatatgctggagtttctactgggattttaattttcactaaaacaggtcatggtggaactgataatgtatggttttatgacatgaaagcagatggcttttcattagatgataaacgttcagaagttaaagaaaatgacataccagatattatagaaagatttaataatttagataaagaagttgatagaaaaagaacagaacaaagtttctttgttccaatagaagaaatcaaagaaaatgactatgatttatcaattaataaatataaagaagttatttatgaaaaaatagaatatagaccaagtaaagaaatacttggtgatattgcaagtttgaatcaagaaattgataaatgtattaaggaattacagtctttactagaagactagaaaggagttaaatccaaatggtaaatttggatttgtagggatgatgagagttaaaattgaagatgtatgtatgaaaggttcttctaatttaaaacaatcggatgttgttggtaaaaatggtatatatcctgtatatggcgcagcgggctatttaggtagtattgattcttttaaacaatcaaaaccatatgttgcagtagtaaaagatggagcaggaataggacgtgcgatgttattaccatctaattcatcgattataggaacgatgcaatatttattacctaaagataatatattaccagaatatttatattatttgataaaagcaaaacatcttgaaaaatattattctggtgcaacgataccgcatatttattttaaagattacaaaaatgaagaatttgatttattttcattcgaaatccaatatcaaattattaataaactaaagataatcgaaaaaattatagaaaaacaaaagaaagaaatggatttgttagatgaattagttaaagcccgatttgtcgagttgtttggaaatatatttgataataaaaattgttttcctatagttaaaattgaagatgtatgttctttgattaaggatggtacacatcaaacacctaaatatgtagaaaaacatgaagggggatttaaatttttatcctctaaagatgtaatgtcacaaaaaatagattggtcaaatataaaatatatacctatagagttgcatgaaaaattatattcagcattaaagccacaaaagaatgatattttaatgtcaaaaaatggtgttaattacggagttgcagctattaatgatactaatgaggtctttgacatatatgttagtctagctttattaagacctaaagatattattaattctatttattttaggtgtgcaattaatagttatgagactaaaagacaatttgattctagtattaaaggtattggtgttcctaatttacatttgggagagattaaaaaaactaaaatattacttccaccaattgaacttcaaaaccagtttgcagacttcataaaagaagtcgataaatcaagattagaagttcaaaaatcgttagaaaaaacacaagaattatttgatagtttaatgcaaaagtattttggataatatttaaaattaaataatagaaaagggtagtagatgatgttggtaatggaggttactaacatgaaagaatctattataaaagaaattgaacaaaagttattacgttatttagataacgcacaaatggaaatattacataaaacattaacgaattgcttagataatgttgacatttcaataaaaaatgaaaattttgaagaaatttttgattattcaaatattgaattaatagaaaagtttatctcatctaaagaaattgaaggctgttctgttagaacgattaaatactataaatcaacacttgaaatgttggataatcgaacagataaacattttacgcatatgacaactgatcatttgagaaaatatttaacagattatcaaaagaaaaataattgttcaaaggtaagcatagacaatattagaagaaatttaagtagtttcttttcatggctagaagaagaaaattatattcttaaaagtcctatgaaaagaatacataaaataaaaacggataagattgttaaagaaacattatctgatgaaacgttagaacgtttaagagataattgtgataacataagagatttagctattattgatttgttagcttctacgggaatgagagttggagagttagtaaaaataaatataaatgatattgattttgaaaatagagagtgtgttgttttcggtaaaggaaacaaggaaagacctgtttattttgatgcaaggacaaaaatccatttaaaaaactacttaaatagtagatctgatgataatcctgcattatttgtatctttagataaaccgtacaatcgattacaaataagtggagttgaaataagattacgtaatttaggtaaacgcctaggtattaataaagttcatcctcataagtttagaagaacagttgctacaaaagctattgataagggaatgcctatagaacaagtacaaaatttattaggacattctcaaattgatacaactatgcattatgctatggttaatcaaaataatgtaaaagagtcgcatagaaaatatgtagcttagtgctaaatttggatttgtagggatgatggaatataaaaagttgggtgatattgcaacatacgtaaatggatatgcatttaaacctgaacaaagaggaaaaaaaggattacctattattagaattcaagatcttacaggaaattcatatgatttaggatactatgaaggtgattatcccaagaaaatagaattaaataatggagatgtattaatttcatggtctgctagtttaggggtataccattggaatcgaggtaaagcactattaaatcaacatatatttaaggttatatttgataaagttaatataaataaattcttttttatgtatgctgtggaatataatttaaaaaaaatgtcacttaaaactcacggagcaacaatgaagcacattacaaaaaaagattttgataatgtaattattccttttccaaccttagaaaaacaaggggaaattgcccaagatttgaatattataaaaagaataattgaaaagtacaatcaacaaattaatttgttagacgaattagttaaagcccgatttgtcgagttgtttggagatcctgcaacaaatgaatataattggcctatgctaaatttagaaaatgtatcgtcaattatcacttacggattaactgttagaccaacttatgttaacaaaggaattgatttgatttcagcaagagagttacataaaggatttattgagtatgaggttgctcctaaaatatcttttaatgattttcaatctctttctgataaaggaaaacctctgaaaaatgatatattattttcaaaaacgggttcaataggtcattgtgcattggttgatactgataaaatgtttgctatcactcaaaatgctgcgagattaggactcattattgaaaaagttaatcctgtatggctattatattatttaagaatgaattatattcaagattggtgtaaacgtcatgcaaaaggaaatgcagtaaaagatcttcaattaaaagatattaaagcaatacctttatttgaatgtccattagaacttcaaaatcagtttgcagacttcgtaaaagaagtcgataaatcaagatttataattaaaagtatgataaaggagggtctattatgacaaactttgattatttaaaaagtgaaaaggaattcgaaagttttgttgatattgctattacagcagaaaaagtatttaatattgacattggaacttgtgtttttaattgccgacgtgcaatggaaatggcaatcaaatggatgtattctgtcgataatgatttagaagttccttatcaagactcactttatagtttaatgcatactgacgaatttagagacattataggtattgatttatggagaagattagatttaattcgtagatacggaaatgacgctgcgcatacttcgaataagatatcagaaaatgtggcaaaattatgtttaaaaaatttattttattttacagattttattgcatgttgttatggaaagtcatatcaagcaaaggaatatgatgaaagtctcctaactaaccaaaagtcaaaaaatattgaaattgaaggaaaagaaattaagcttaatgaccttattgaagaaaataaagcattaaaacaagaattaacatcaagaagagaacaacaacatagtgattatgttccaaaaccattggacttatcagaatataaaactagaaaaatatatattgattctatgcttattgattcgggatggattgaaggtaaagattggattaatgaggtagaattagctggtatgccaaataaatctgaagtagggtatgctgattatgttttatatgatgattctcataagccgttagcagttatcgaggcaaaaagaacatgtgttaatgtatcaaaaggaagacagcaagcaaagttatatgctgatctgttagaaaaaaaatataagagaagacctgtcatatttttaacaaatggatttgaaactagaatcgacgatggacaatatcctgagagaaaagtttcaagtatttattcaaaaagagatttagaaaaactttttaatttgagaagaatgcaatctcatttagattatatccaagtaaataaagacattgctggaagatattatcaggaagcagcaatcaaagctgtttgtgatgcatttgataaaagaaatagaagaaaagcattacttgttatggctactggttcaggcaaaacaagaactgttataggtttagttgatgtgctgttgcaaaaaggatggataaaaaatatattatttttagcagatagaaattctttggtaactcaggcaaaaagaagttttaataacatgttaaaagacctttctaatacgaatcttgtagaagaaaaagataactataatgcacatgccgtattttccacatatcctacaatgatgggatgtatagattctgttaaagatgaaggtaaaaaggtatttacatgtgggcattttgatttgattatatgtgatgaagcacatagatctatttataacaaatatcgtgatatctttaattattttgatgcaccgatagttggtttaactgctacaccgaaagatgagatagataaaaatacatatgaaatttttgaattggaaaatggggttccaacttatggatatgagttagatcaagctgttaaagatggatatttagtggattttttatcagtagaaacacaaattaaattcatgcaagagggcattaattgggatgaattaagtgatgaggataaagaaacctacgaagatacatttgctgatgaaaatggagatattccaaaagctattaattcatcggctttaaactcatgggtttttaatgatgatactataaaaaaagttttacaaatattattcaaagacggcttaaaaatcgattatggccaaaaaattggaaaaactataatattcgccaagaatcatgaacatgctgaaaaaatttatgaagtatttaacaaggaatatcctcatttgacaggatatgcaaaagtaatagataattatataaattatgctcaatcagcaattgatgaattttctgatccaaacaaactacctcaaatagttatatcagttgatatgctcgatactggcattgatgttccagaagttttaaatttagtattctttaaaaaagttatgagcaaggccaaattttggcaaatgattgggagaggtactagattgtgtccatatcttatggatggaagcgataaaaaaatattctatattttcgatttctgtggtaactttgaattttttagaatgaataagggaaatgtttcttcaaatattttgccagttcaaggggcaatctttaatttgaaatttcaaatagcatataaattacaagatattgcatatcaaactgaagagttaatttcatggagaaatgaattagtagattatatggtcggcaaagtacaggaactcaatagagaaaactttgcagtaagacaacatttgaaatatgttgatctattttccaatcctgataattatattactttatcatatgaagatagtttgatggttagtcaggaattggcgccattaattctaccagatgaggatgaaattacagctgttaggtttgatgcattgatgcatggaatagaattggcatttttggcaggtaaaaaatatacaaaaggaagaactgatttagtaaaaaaggtagaagatatttctaaagtatcaaatatacctgagataaaagcacagtctgagttgattaatcaaatattacatacaacatatttggaagatgcaggtataaatgaatttgaatgtatcagaaaaaaattaagagaacttattaaatatataccaaagcaacatataagatttgatacgaattttgaagatgatattttatctagtgaatggcatgaatcaaatttagaatcagacgatttaaaaaattatagaaataaagttgaatattatattagaaaacatgtaacagacaatccagttatattaaaattgaaaacaaacaaaccaatgaataaaaatgacctaaatgatttagaacatgtattatgggatgaattgggtacaaaagaacagtattattcagaatatggagataagcctttaggggaatttgtaagagaaattgtagggttagatatgaattcagcaaaagaagcatttgcagtatatttgaatgataccaatttgtcagaaaatcaaatctattttgttaaccaaattatcgaatatattgtaagaaatggtgttttaaaagacttatctgttctacaagagtctccatttactgataaaggaacggttgtagatctttttggtgatgatattggtatttggcaaggaatatcaggagttattcaatctattaaccaaaatgctctatttgtttaaaaaataagtaatttgataaataaaaatgcaagacttcagtaaatattatttttattccagttttattagtaggtggtgcatcagtagttactggatgtgttcatgaggaaactaaaacaattaatagtattcaaaaattaagagtaggacgaacaataagcgtgatgtggagaaaaaatattttaaaagtaatcatgctagaaatcgtgtatttgaataaaaaagttatttattaaaatactgattaaattttggtttcatgaattatcaatgagatattagaagtttctgtgaatattaaggctacggaagcgacatctgcaatatttgtacttcaggtggaactgaaaagaaaagggtatgatgataagaatattattatgatatcaaaactttttggacaaaagctgatgagtgtacttcattatgaaaataagtatcagcttgcaatatatgagacacgcttgctgaaatcagactggaagaatgaagaagaaatttcgttaaaactgaatggtcttgacttaggaagtgtatgggataattttgttacacaagtttcagacattaatgtgcaggctggaaatacactggaagaacagataaatgtagaagctgaaaaagaaaaactccaaaagcagatagttgatttggaacttaaggctcgcaaagaagtacagtcaaagaaaaaattcgagatggttcagtgtgttgatttgtataaagaaaggtttaaggatgtgcaatgaagaaaaaacagttaatatggataggaatagttactattctgatagctatacttttagctttcggtttaaatgtattatttaaagtacatacagatggtattttttcagcagagtgggaagccggagatgcattaaattatgtagcaagcatatttggtgcagttggtactattatattaggttatgttgcatataagcaaaatgatagattacaagaaatggaaaataataattatattgcaaattacagtagtatgatactaatggacagtatatatataaaacaacaagcagatattcctgttaattgggacatacattctgaacagataattaaagataaagcttggaatgaaaatgtgtcatatgttgggtataaatttacttttaatgggacaagtataggaaatagtataccagtattaatacatataaaaaattgtaacatattttgtagtgatgatagcaataagaacatgagtagccatttgtttgggaaaaattactcgaatgtatattctagaattgcaattcatcaggatgggaagataaaatttggattgacatatgttatagatgcgaaaaaacgtggtgagttcgaagatgcaataaagcagagtgcatacaaggtaatcatagaaatagtatttgacattgttacagataaaggtgtagttactcaatgcaagtgcatttcgaattgtgatggtaaaaagtgtgcaaatctaattatatgggaggataaagacccgaaggtgttcttttatggacacaacatagcaaatattaatgaattaaagatagcaggagaggaagaaaatcatggataaattaaaaatgcaaacagagaatatagccgataaaaatgcagcgtcttggtttaataaatccagttcgacatctgtaagacgtaatcctataaaatgtctgtgattcagttctttatctttgttttttgttctcatactcctccttccgccgagactattcctcccactgggagtccacgtatttcaatatcggctgtcccttccgatattagaaatagtgctgtgaacacctttaggtggaaccaacagacaagtgaaacgtctgttattgagagggtatggggagatccccatcaagataaatcccataggagaacaggatgtcaaatgacaatactgttaaacatgggtggatcttgctctgtatgtgtacccctctatataacgaaacgctcagaggctgttttacagtgggggggaaaaaagaaaaaatatcaaaaaattgatgattaatggtgagcttgtgatacaattgaaaaaagagaaaagcataaaagttgtagttgcggagaatatttgttgtgattagaaagttgctgaacggagatatcgatagaattgctgacatatggttaaagacaagtctgaaagcccattattttatttccaatcaatactggaaaagtaattatgaattagtaaaagaaatgatgtcacaatacgaagtttatgtgtttgaagtagataaaatgatacaaggatttgtaggactaaatgataaatatatagaaggtatttttgtctccgatgaaatgcagtcatgtggcataggtaagcttttattagattatgttaaggataaaaaagttagcttacgattaaatgtataccagaagaatgccagagcaatttctttttaccaaagagaagggttcattattcaatgtgaagacttggatgaagctactggtgaaaaagagtacactatgctatggaaacgaaaatagaaatcgggatttggagaatgtgaatgagtagcatgaagaaaacaaaagaaggaattaatttgaaagaactccttaggctgaagaatacaggtagtatctttgtgattgcgggacttttgatgatttgggtaatagcgtcgtacacatatattctgcaaagttcttacactaagaccgcccttgaaacagaaatcacacgtgacacagcgagtgcagatgcagtacacaaacttgtgaatggaaaaatcggcaaagaagattttgatcaaatcaaagatcaatctgatgaaaagaagcaattatataaggatatttcttcatatttcaatgaaatcagaacactgaattctactcgatatatttacaccgctacaaaaaatgaagaaggaaaactcgtttatgtggtagatggtttggatccggatgcggatgatgtaagacaccctggagattatattgaggaagaaatggttccgtatattgatagggctatttctggggagaatgtgtactctcaggatatcattgatacaacatggggtccgatttttacggcttgctatcctataagcgcaaatcacgatgggacaggagaaatcattggcgcattttgcattgaaatggatatgcaatcagcttatggaatggttgaaaagacgaatcatatttccatcatctgcggtttagtcgcaggagctgtattgcttttaatttgtctatatacctattatgtttaccagaaaatcaaggcagaagagcaaaaacaattattaatgaacgccgctgaggaagcagatgctgccaacaaagcaaaatctgcgtttttgcttaatattagccatgacatcagaacaccgatgaatgccattattggatttacaaacattgcgcttcatcagaacacggtttcagatattcatgatagcttggagaaagttcaaaaaagttcgaatcatcttctttctttgttgagtgacgttttggatttcagtcgcattgaaagcggaaaagttactatttcgcccgagccagtggacattactcaattgacagataacgtccaggcgattatgaatggacttctttatactcgagatcttaagtttgaagtacatcgagaaatcccaaagaacccatatgtccttgcggatgttgtgcgtatccgggaagttttggtgaatcttcttggcaatgctgtgaaattcacaaaggacggcggaaagattactttggatatcagaagttacccaggagcggacgagaaacatatcataactcgttatgttgttcaagataacggtattggcatgagcgaagagttccagaaaaaattattcgatccgttttcacaagaagatgatgctaatgccagaactcaatataagggaaccggtctttgtatggccatcacaaaaaaatatgtggatatgatgggcggttcgattgctgttgagagcaaaaaaggtgtgggttctacattcacagtggagatcccactggagttgacagaacaggttattcaatcagaacaaaaaacaacatctgcatagagatttgacgggtattcatgttcttatggctgaggataatgatttaaatgctgaacttgctacgataatgctggaagatgctggtatgaccgtaacacgcgcatcagacggaaaagaagttgtgaatttgtttaaaaatcatccacgaggcacatacgatcttattttgatggatattatgatgccaaacatggatggacaccaagcagcaaaagccattcgagccttgggtatagagcggtccgatgcagttacgattccaattatagctttgtctgcaaatgcttttatagatgatattcaggaatctctgaattcaggcatgaatgaccatatttccaagccgattagcatggaggaattaatcgatactatcactaaatacattaaacacgattaggaaaacaaagaagttaattctgatgaaaagtttgcactggccttgtcggatgcgaaagcgtaagtttcctatgattatgatacgggtcgcatcaccacatttcttatcagcacccagaaccaagaggacacctctgttatggatattcgctcgctggcggaagctgtcatggaaaccgccgggaagatcaagaacgacaatatgtccgatcaggatttctacaaattcaagtttacagaactgaatcaaaagagctcgaaggagctctttttccttttttataatagtatcattatggtataatagagacattagaatcggaagtttacagcgaggtgaaagaggttgaattatgtagaatatggaaaagaaaacagtaatgtaattatcctcttacacggaggcggtttatcatggtggaattacaaagaggttgctgaaagacttcaaacagattatcatgtggttttacctatattagatggtcatgcaggatgtgataagcagtttacaacgatagagaataatgctttggatattatagaatttgtaaatagcaaattgggcgattctgttttaatgatgggaggactatcacttggagggcagattttgcttgaaattttatctcaacgcaaagatatatgtaagtatgcaatagtggaaagtgttcttgtgataccttcaaaatttacatattctatgattaaaccggcgtttggaagttgctatggcttaataaagtataagtggttttcaaaattgcaattcaaatcactacgaataaagtcgaatttgtttgatgaatattacaaagatacttgtgctattagaaagagtgatatgattgcctttttacaggaaaactcagtatattcactaaaagatggcattggagagtgtgaagcaaccgttcaaatttatgttggagaaaaagaaaagcaatcaatgaaaaaatctgctaaaatcattcatgaaaaattgcaggatagttttatacaagttcttcctaatatgtatcatggagagttttcaataaaccacgcagatgattatgtgagaaaactattagaaatagtaaagcggaggtaactgtggagaagatgagtacttatcgtaagaagcagtaaatgttatcgcatgggcacaggaaatgtagtatactgtgcctatgtaaaaaagaatgtgttttacaaatcggaatttatcaacttgtagttttgattaatcttcatgtaaattcaaggtgaaacaaaattacctaagatgatatgcccattaagggaaaacttcttacgttataatattcaaatttttaaaggaaataattagagtattgatgatatgttgattttatgatgagtttttatggttattataaaaaaggagattgtttatggcaagtaaaactgaacgaataggtgtgtatcactgtggggaaattgctgaacgtaataattggatgtttcgagagcaaccagttgatgatgtcggtattgatgctcatatggagtttattgaatcgtctggtaaaccaaaacaacttcttgcattgcaaataaaatctggtgcaagttggtttaaagagaaaaaagatggttacataattttcaggaatattaacaataggcaatacaattattggactatgaatactttaccttgtatagtggttttatataatcctgatgatgatatgtgtatttggcaaaaattaacggatgaaactattgaaagaactaatgatgggaaaggaaaaggcttttttgttaaagttcctataactcaagttttcttaaatgcttcgtcaaatgaaaaacttctttcttttacaaatttgccagaacatattacaaattacaattttttgttgtctcagaaaaagtttatgcaaatcattcacgatggtggagaaattaagctacattcaatggaatgggtccataagagcagtggtagaggaaacacggaattaattgtggatgatggaaaaagcatcgaaaagtattcgtatccatattggtttccctctacaccgtataccatggttttccctcgactgtttccgtgggcagatttttcagctgatgaagatttttttgaggaaaatgacaaaaatctttggcgtgaatatcactgctattatgataaggaggaggcggaatggttgattgtgggagatacatttgaggaatttcgtagaaaattaaacccaatgcgtagtattgatcgttcaggagaagttgctgaatatatgatgaaacttagcttaaatgagttgggtaaatcatttttaaatgtagataaatttgtctcacaaaatcagccttatactgatacaagaccaaaaggagaatgagatatatgaaaaaaatcaaactcaataagaatttaggaagaaaaacgtcaattgatgagtacatacttgatcctactgaaaagtatgtgatagacattgaagaagaaatggaatttcaagtggcgacgatgatgtcatttcaaataatgggacctcctcctgcacttaagaattaccatgcttggttatttgaaaatggcttcaatgtagatgcaccaaatccaacaaatgaagttgttgcttgctattatggtgttaaaccactttggaaaactgcttattcgcaaggcgttgttgtaaaagccgagaaagatagcgactattatattgtgatggaatgtagtagcaagaataagggatataggcatgcacaagtcattctaaccatgggaggctgcatgtaaaatggttttaaatatgataaagttttaatagcaacactcagtagcggtattgcttccttataagcagaaaagatataaaacaagaagtagtatccaagtcttataagcaatagagaatttgactagtaataggaaatgcaacgaatgtcagtaaaaaacagaaaatttagaatttgtataggagacaatgatggataaaaagacacaaaaataggagtgatttgttcaattgtacagattatattaagcataatatgcttgatttatagcgcgataaatcaagaaaatataatactttgggtaatatttttatgctctggaattttatcgttaagctcgaatattagtagaaacaataaaaaagaagacgagtgaggaagtgtaaattcaagtttgcatatttcatcaaacggtacatattaaaattaacacaaagggagatgttagaatgaaagctcatgaatattggtctgtcggagcattgataacgatgctaggtactttttatagcggatataaaggttcaaaatcaagccataaatattttgcggcaagttctttgctttgtatgattatggctatttatacaggtcataagatgatatctaaaaacaagaaaacaaagaaagaaccaatatcattaggaaatgaagaataatacaatcaaccttgtgcccagtgggcacgaagttagcatagtcactatggtgtcaggagaaatcctggcatctacgcaaaagggacaaaccaaagtatccaggtttccactggtagtaataagaaatcgcaccagcaaagcatttgtagtgatgatcatagcttatggaaataatgcagaatttgtggagaaatatcttgaaaaaggaattaagattgctctctctggagagttagtatggattgtatgaaaatcgcaaaaatcattttatctataataacaatgcttttcgctgtattaggattagtgaaaattcttccttttgacatagcaaacccgattatgcttgtatcacttgccactcttttactattaagaagtgtagaatataaaaataatcgagataaaagtggttttttcatgatctgtttaaccgcagtatttgtctatgttgtagtgatttataatatttttataggatagtaaaatttgaagttttttaagtaaattacaactctacggagcattgaaaccgctaaaactcaccatattctacgttacgtgggtgtaaacaaacaatgggaatttatacaatgaatccagaaaggaggatacgaacctatggaccaaattaagataggtaaatttattgctgaagaaagaaaagcaaaaaaatatactcaacgggaattggcagataagcttaatatcagcgataaaacaatctcaaaatgggaaaggggtaatggtttcccagaagtctcatttttatttccactttgcaatgaactagagattacagtaaatgaacttctatctggtgaaagattgcaagcgatggattataaaaagaaagcggaggaaaatatggtgaatttagtgaaagaagctcaagagagaaaaaagaagattataatgtctgcaatggttggtgttttggtaattgttgcagcagtacctttatttgtgttgcgggaatgtttgaaatgcaggtatggactagagtgctattgatagggattggatttgtaataatggtaatgggaatctctattgcatgtgtattagacagagaagcaggagcctttgaatgtcctgaatgcaaggagcgatttgtttctgatatgaaatcctatgttacgggacctcatacaattaccaaaagaaagttaacttgtccaaaatgtggatgtacaaaatattgtaaacatgttttaactagataaggtgaaaatttcagtttgtctgactcacaacaatttaatatcaaactgatatgtaatgacctcttgtcaagtacaaattaacagaaatcaccacaaactttatttaattgttgctgaaggcacccggaaagagcctcggagcatcagttcccggccttggccactctgatatacgtggattggttacctacaggtcaatggtccgctgtgagccctaccgtctaattgcgtggatcacagatttctctgtgctgacatagtttgagcgtagatagctcgaaccttgaaatggccgaagccctttcaggatgtcttaagttgttactttttattggccagatgtatgtggcataagccatcttacatctgcttaattacccaccataacagcgggatgatgatgtcaaggttgcatgcagacatcgtctgcattgcatcgctttagaggcctgaccttgatattagcagcatggtgtgatttctgacttatgtgatgtgatcagtcatcataccccacatgaagcatgctaattctcttgcaatagctacttttgctacattgtgtttcttgctctgaccaagcaccatcttgtagcatcggcgtcttagtctttcgtttgctttgtctgcatagcctatcacttgtgctgaattgcctgattgtctggatttcaaatcttttgatttgtagccaatctgaccgcgagtatagctttgagcagcctctgttagcaacaagcgaacatgtcgattgccagctttggtaattccaagtaggttgcgatcgtcagaactggtattctcaccaggtaccaaccccagataggatgcaaaattcttggcacttgcaaaacgattgaagtcacccacttctacaagtacagataatgcagtgtgcgttttgacaccaataaagcaacacagttttttgacagcttccttgtattcatccttagatgcaagttcttcaatacgcttatcaagacgctcaagcttatcactaagagtagtatatgtcagcaggtattcatcaaggatctctttatatagagcctcaggttgtaaggattttaaccaacgtaaatgtgcggccgtccaatggctgttaccatcatagcgataattatggcgaagacaaaacgcaaggatctgctgcttgatcttttttagagtaagcttatgatcatccctcatgcgaaggaattcttttgtctactcatctgtggcagtaggtatgtgaacaggactgtagttatgctgagccaggcattttgcgataatctcagcatcacgtttacctgtcttaatacgctttctgctgcgttgctccagcatggtagttggagtgcgtataacacactccacatgctgagacataagttgatgacagagggtgtagccgaggcaaccagcctcataaccgcatataaaattagcattgtctccgtaaatggtacgaagaaactccagatatttcagaacctttttgtaatcggcttccgttttttggtagcgagaagctttctcatcttcaattgtcattgagcaaagtgtaaaactttctttgtgaacatccattcctacgtaaactgtggtataattcatttgatgacctccatttgtatgcggtaatccctgttaccattgtttttttccaattcatagtatacaggtaaatccacgttgctacaaatcagaggtcattacatattgtctaaataattctcgaaaatgataaaatatcgagtatatatggattaaaaaatagggtactattcaaataaaagacctcataaattatagataatcattataagattgaagtcttttaatttattatttactcattatcgagtaagaaccaaataaatgtttgtttttttgatctttaaaatatttttatattatatgatgctattaaatataccgattaaaataatttagatatttatttagagttatttttaagaaaaagaattattcccatatgtaacagtctattttcaaattcttctttatctaatctttttataattgattttcttgtatgtttcagtgatcgacttatcgaactatgattgacattctcttcttttgctatctctacaatttttttatcttccaaagcgtattctagaaatctttttttagcaataggatttaagtcatctaaaatacaaaatataatttcgacatttttcttctgtatctcttcgttttctttttgttcttttgcttcttctaatttttttaatattgtttcgggagtattgtttgttaataaatatgtacgtgaaatataatcatttaaatctaaggtgtattttacataatacctgtattgactggttgaacaattttcttcctttctttctttttctaataaatctgccacttcttctggaacatcataatatgtgttttttttatacttatcagggtaatacctatgtaaatctatactcttttcttttattccatctttgtgtgattttatcatgtttttttcctcctataatacaaaggaaaaaaacaaaaaacgtgcatgaatttttcaaagtaattaatttattttattagaaatttaaaaaataggaatacctatgggaaaataaccagttactaagggaaaatatgtaaatacattatgattatgtgcacgaaaataaatatttttcactgaattataggaggtgaaaaattatgatagataacatttgcaggggagaattatatattgctgatttgaatccctttgagggatgtgagcaaggaggaataagaccagtattggtaatccaaaatgataagggaaataaattcagtacaacaacaatagttgctcctataacaagcaacatttatacaaaaaagcggattcctacacactttacgatagattatgcattggatagaaaatcagttgttttatttgaacaaattagagtaattgataagaacagaatattgagatacataggaaaattaaattcaaaagatttaaaaaatattgataataaaattgctatcagtttaggtattgaaaaattataaaaaaattaatggtaatgatgtacaaaattctattccttatattgtaagtgccaaataaaatagtgtatttaaaaaagtcgattgaattgatacaatgatcaatttagtcggcttttatttcaaattcttcttttatttcttcactccatggtaagaaccaatccaatttctttggatcttcaaccagatcttgttgaggtaaataatccagaatgaattcaatataatcatatggattaagtttgttggctttagctgtttcaatcaagctgaagactgcagcacttgcttcagctcctttagtagaagttgaaaacagccagttctttcgaccaactgtaaatggtctgattgtacgttcatctaatgaatttgtcataggtacaagaccatcttctaaaaatgaacgcagtcctgcctcgtaattcaaggcatattgtatagcttttcctgtcttagaagctgttaacaccttgttttgattttctttgcaccataaaaagaagtcatcaactaatggctttgatttttcttgacgtactttctcctttttatcaggtgataatgtttcgatttgtttttctatcgcaaacagtctggctattttttcaacagctgtatttgcgagtgtatctgatgcattcttcatatctacaggcaaagcatcatagaacttccgtctggcatgcgcccaacaataagcattggttacaccatctatatggttatatccataatagccatcagtaatgatagtaccatcaaatcctttcagaaattcttgagggttggttgcttttctgtcaggtctgtaatcaaatatcttaacaggtcttttactttctttgatacttgaatatacccacatatatgatttagaagtagccttcttacctggttcattcaatacctgaactggcgtttcatcacaatgtatatgtgattccttcatcatcagttcgtgcatcctgtttaccaatggaatgaaatattcattggcggcaatgatgatccagtttgccattgtcgttcttgaaagtttcattcctaatcgtttccattctgattcttgtctgtatagtggcatatgatttacatatttatcaatgattacttgtgacagtacacttggcgatgtatatgaatgtggaacaaccggttgaggtgtgccagctttaagcatgactacctttcctttttttctacagtttcgacattcatatgtttttcgataaatatcttttacatagagtttggctggttcataaataacttcatgtcttacaaattcctcacctacataagataatttagagccacattcatcacatactctgtctttttcatcaacatcataaactttttttacatgttttagcttgtctaatttgatatcaattttctctttttgtttctttttggctctggtatatgagatatcttcaagcagttcaggttcacattcattttctgcttcatcaaaaagagaaagctgatccatagaatgtgttatcttttcactcttggtaccaaacagctttctctttaaataggcattttcttcacgcaaaagttcattgttgttttttaagtattcattttctgctttcaaactgtcaatggtactgttcaaagatgcaattgtagctttcaattcttcaatagaatgtgacagattagccattaccaaagctaaattttcaactgtacctgtagtagaatcagccatcaaaagcacctccatttcatacatccattataccataaacaggcatattatcctatgaaatcaaggctttacagtacaacttgtggataacttttctgaatggtcttaggctgtacgatagaaagtccttcaagcagccatctgaattgttgaggggttatttctcgagcttctgattcatctctgggccatttaaatttaccattttcaagtcttttataaagtaatacaaaaccatcaccttcccaatacagagccttcatggtccttgtatttctaccacaaaacagaaacacagaattagaaaaaggatcaagcttgaagttctgttgaacgatagctgaaagaccatcaatctgtttacgcatatctgtatagccaacagctatataaatatgttcggcttttgaaatatcaccaatcataatagtgacttcaaaagaggctcaatactttggtaaggtgtatctgaatcgagttcaattttgatgcttcccttgataatgataatcttttcattattgtgtggttgcttttcaacagaaacaaaggatacttcattcttgtagctgttttcatttatctgatcacataaaatatttctgattttttgttgataattataataagtcgacggcttgatattgtttttgtcacagaaatctttgacagataaaccactttccttgcattctttgattttaaaataccaaaatttatatttttcattttcggtaagttcctgtactgtcatatagtctctcttcctttccatatagtttttggagaatataaaaactacaatatagtttatggagtctccacattctatattgtagttcttagagttctatatttttatccactattttatttggcgcttaccttatattcaattccattctagaaatttgaaaatcaattgctgaaaatatagacattttgccagaatatttaaagaggcaattcaagcaagaaaatggattaactgttaagattaagggataaatagtgagacaaaaaagaaagaattattactcaagattacattgaatatatagacattaaatgatataatttgtctataataatataggagggatttttatggcaaacctacgagaaactattagaccatccgcagatttaagaaatcattataatgaaatttctaaacaatgcagagaagaaaaagaagcggtaattattactgtacatggtaagggagatacagtatctctttcttttgaagaatatcaaaatatgaaggctcatattgaattattagaaacattagctgaagctgaagacgatgtaaaaaatggacgagtcgctcctataaatgaaacatttgatgatttaagaatgatattaaaaggtaagtaatatgaaatataatattattcgaacagataaggcagatgagggaatcagacacactgttttgtatttagcgaatcattttgggaatgaatttgctttagaaaagttagattatattgaaaacactatcttacttttagaagataatccttatataagaacgttgcctagatatgcagtgttaaaaagacaaggttacagagttctgatattagaaaagaatttagctttctataaagttaatgaagaaaaaaaagaagttgttatttatgcgtttgttgatcaaaggcaagattatttgaatattattagaggtttataaggctaaaaagggttttatatgctaattatgttgatatacatgaatatttgatgagcataataagttttataagataaaatgaatgctcggattaaggaattattataaaagcaacgaatcattagaaaaataaaccctgaaaaattggttttattagagttaatgattataaatcataaacttattttgcttgattagcaggtatctaacgaaaatagttcagtcaaaattacaaaagtttacctagatattaaatttgaaaaatctaataatcttttaaaagaaatacttaaataatgttattctaaaagaactacaaccaataatataataatgctaccaaacgaaaaggtattataacaaaataaatattcataaatagaaaaagaacaatgagacagtataaatgaagcattgttctttttttgtttaacttatatatggaaaaattctacagcaaaataattaaaacatgggaactgtctttacaagaagatttaggtatgaaaattactataaattgaagcattaaaaaaaatataagaaaattagtaaaaatgatgcacgaaatttaagagttttatcagtatagtgaagggattaaaaataaccctagagagaaccttgaaaactgaataaaggtaatatcaatacataccggattgttaaatcaaaaataatgatactcatgattagccttaattcgagcgtcaaaagcgtcgcaaatataggaatcgtacaggataaaacaaattgaaacctgtttgttgttaaacaagtgctctgttaataaggttatacagagattgatatttataatttgtaaagttgaatatttcaaaaaattcgttcaacgttctttgaaatattgcaattttgtacattactaatttcttgaattttttcttatgatttaagcgaaggaggaaatgaatatggataacaataaagatgaaaaaatactactaacattaaaagaagcagcaaattattttggtattggaattaatacattaaggagacttactaataaacataccaatttatgtatttttaatggaaatagaagaatgattaaaagaccaaccatggaaaagtggttacttaatcataatgtttttgattgttaggtgaaatgttatgggaaaagatttaaggaataaagaattaggactaggcataagtcaaagaaaagatggagtatatgtagctcgttttactaatagagcaggaaaacgtatctttttttgtgatacaaacttaagtttattaagaagaaagtttgaaaaggctaaagttttagattatgaaaacagaagtgttgctagtggatcttataccttaaaagaatggtacgacttttggataaaaaattttaaaataccgaacgaagtcacacctcaatatatagaacatttggatgcgacatttaataaatatattctattaaaagatagggggaatattgatttacgtgatctaagaaatattgacattcaattaatggttaatgaagcaaaagaaaattcagttagtgcatctagaaatttattatcgatattaaaacaaatgttggagttggcttatgaaaatgatttaattttaaaaaatccagccaaaagtgtacacataaaaaagcctaaaaggaaaagtactgaatcaatgtctagaaaagatgaaaaaatgcttttaaagcatattagttctcaacaagtaagggatatggttttgatgatgttaaatactggactaagaattagtgaattattaggtttatcttttgatgaagtaaatttagaagaaaggtatattgaaattagtcatcaattatcttacaaaaggaatgaagaacgtgaatatacttttacgcaaactaaaaataaaaagaaaaggataattccaattaatgatgtaacatttgaaatattaaatagagttataaaaaaaagagaaaaacaattagggaaaacatatagaggtaagagtgccataagtgatcaattagtatttgttacagtttatggtgatgcatattgccgctctggatttaatagtactcttaattattcaataaataaaactttaaaatcagggtatgagtttgaatgtccaagattatctccacacatattcagacatacttttgcaacaagatgtttagaggcaggtatgtcaccaaatacagtaagttcattgttaggacatggaacaattagaatgactctttcttatgtacacaatagtccagaaaagttcaaagaagatgcgtttttattgaatagaatttaactatttttgctggcattgagttggtattaagaaaatttaatcttaaaaagcactgaatttatgggcatttttttgatggttcactacattcttgtcaatattgttgttaaatagttataaataaaagagactgtaacgcattaaaattgatatgcttctttctggggagacaagtgaaataataaaaacttgtcacttaggaggaagcatattttatgtctaaaagaaaaatatccattgaggataaggtatatgctgtaaatttgtatctagatggaaaagaaagccaaaatcgaattgtatctatgtttggtgtcagcaagctgttttagattatttagatggtcgtggttccttggatgatatttgtaaaaaatacggaatttgtcaaagattgaagttacaactctggataaagaagtataataatcatgaagagttaaaatcatctgaaataggagaacacactattatgacaaaaggaagaaaaactgcatttggaggttgtacagagaaagctctgaaaacgaacaaaaaaacagacggattactgatgagattgaaaagctccatacagagtcaccagatagaggataatgaagaattagagatgatctagaatgttatcatgacattgatgttaatgataaacgagtactacgtactacttaatatcaaatcaactattaaatactctactaatggatgtacaggacaggctgtaaatcctcaatatatagctaaaaatttacttaatcgagagtttactaccgatgcactaaatgagaaacggctcacagatgtaacagaattccattattatattagaatcgaaaaacataaaatttatttgcaaatcgcataaaaactgccagtagataatctaccggcaggaaaaattttatattttttcaattgtctacttgacaggttgcagttcactttagacgttacagccttttttaaatacattattaattttattgtatactaatgagaattatatataaaacaataatatatagtttttagctatttttcatataagtcactaattgatcaacggatataccatgttgagctaataattcatcagcattaaaatcagtatgaaaggccttggagataccataattcttgactttcatctctgtcataccgtagaaactgcttattctgtgcccatatccaccttctaattcaccatcttctaaagtaataataagacgatgattattagtcaagtcatttagtaattcttcatctaaacctgttagaaattttggatttattacagtgatatttttaccggtatcctctttgtatttttgagctgtttttaaggctaatggaagcagattacttactccgataatagcaatatcattaccttgttgaacaatttgagatttattatggatagagtaatcagttgtgtcttcttgaccactttcaatcatttgtactgggactctgattgcaattggatgatctttttgggtagttgcatatttaaacatttgtaaatactcttctttagttgtcggcgctaaatagattaaatttggaatatgtgcaaacattgcaatatcacataaagctatatgagtatttgaattcatcccatagactccagcggatagaacaagaattgttgctggattattgttcagacataaatcgtgagatagctgatcatatgtacgttgtaaaaaaggagcaaaagttccaaagacaggtattccgccatttttagcaatcccgctaatcattgccatagcattttcttcagcaatgccaacatcaataaattgtccacgttcgacatattcttttcttacaggttcgatgaatcctagccccatcggtgtaccggcatttacaacaatagcctttttatttgcatttaataagttagtcaagctatcgaatagggtttgatcatcttcatcaacaaatttatatgttccatcagcaacattaaatggaccaccagcatgccaagcttccttgtttacctctgcatatggtaatccttttcccttgattgtatggatatgcaatacgatagggtgatcgatatttttaacactttcaaataattcaattaatttttcgatatcatgcccatcatctaagtatttataatcaagaccaaatgatgtaaatatattgttattacttgttccgttagtgtctcgtaattctttaagcgtttgataaataccgccatgattttcggcaatactttgatcattgtcattaacgataatgatcaagtttttattatattcgcctgcataatcgatagcttctagtgcttctccacctgataaagaaccatcgccaataatagcgataatattttcggcttttttattcaaatctcttccaattgctaacccaagagcaagtgatacagatgtagaagtgtgaccaattgtaaacatgtcatgttcactttcaagtgggttggtatatcctgttacgtcatggaaatgttcttcatctagaaatgcctcttttctgccagtcaatattttgtgtggataagactgatgggaaacatcaaaaacgaatttatcatttggtgaatcaaaaacataatgtaaagctactgtcatttctaccatccctaaattgggaccactatgtccgccggctttactaatcttattaatcaatgctgctctaacttcgttagcaagtttttttaattcttttctattcaattttttaagatcgtttgtatcgtctattttttctaaaaacatatttacctcccatataactagatactataaaaaatactttttataggtgataatatcatacatcttgaagtttacttcaagtcaagagaaaaattaaagtagtttatgagatgataattagaattactgtactgaacatatttattaatagaggaaaataagtataataaaagaatgaagtatagagtagattaattagtaattttatgataagtgaaaagtgataagtaaaaaaggtgattttttgatacaatgaagttcactacacaaagtcacctttttcatttgattaatataattttaagcagttataatgcattttcgaggacatttttctttgcaaagtccacaatttgtacatttagtataatcaatccgtgctaaagagttttcaataataattgcattattaggacaattacgagcacatataccacagccaatacaactaacagcgcaatttttacgagctcggagagctggttcatttgaattacattttactactgcctgtttttgatatggaatcaaagtaattacattatttggacagactctaagacatttaccacatgcttggcacaagtctggattgataacggcaaccccatcaataattgaaatggcattatattcacattctctgacacaactgccgtatcccatgcagccgtgactacattgtttatctccaccaccagggacgatggctgcgttattacagtctttgataccgtgatataagtactgaatcgttgcattttcgcaagtaccaccgcaacgaacaaatgctgtcattcgcattgtttcttcactttctactcccatgatcattgcaatggcgtcagctacactttttcctccaacaggacattgattgatctttgcttcaccagcaacaattgctttggctagcccgtcacatccgggatagccacaccccccacaattatttccaggaagttcttcacgaatttgaatttctttttcattaacagtaatggcaaatttttcactagcaattgtcagaagaataccaataagtaaaccgattgcacctacaataatggccgcaattataatttcattcatcttatattctcctccttatattagacctgaaaagccaatgaatgcaattgccatcagtcctgctgtgattagtacaatgggggaaccttggaatgaaacaggaatatcattatcagcgattttttcacgtatcccagccataataacgatggcaatcgtaaatccaacagctgttccaaaactacaaacaagacttgtcaaaatatcataattattttgaacatttgtgatagcaactcctaaaacggcacagttagttgtgataagaggaagatatactcccaaagaactatataagccagagctatatttttttaagaacatttcaactagctgcaccaaagcagcaataactaagatgaaggtaacagtgtttaaatattctaaatggaagagtactagtattttgtaaactaaacttgttgcaattgaagcaatagacattacaaagatgacagcaccacccattcctgctgctgtttcaattttttttgatactcctaaaaaaggacatagacctaagaattgacttaagacaacattatttactaaagcgacactaattaataataaaatcattcccgtcatttatttttcctcctttaaatcacaaagtgccttttcatcactgctacgacaatgaagacaatcatgattacaattaccatctttgtttttattagttgcacttggcagttttaaacggttttgaatagccgttagaccagctaaaacaaagaaagcgccaggtgccattacaaagatagttacaggttcaagatgagcaaaaaagctataaatattagtgccaactaaatctttaaaaagtggcgcaaactcaattccaaaaaaagtaccactgcccaacatttctctaattaaaccaatacaagtcagtgcaagcgtaaaacctagccccataccaacaccatcaaataacgataaaacgcaactatgttttgaagcgtaagcttcagctcgtcctaaaatgatacaattaaccacaattagaggaatatagatccctaatgtatcatataatgaaggcaaatatgcttgtaatagtaattggacaattgttaccattgaagcgacaattacgatataagaaggaattcgcattctttcagggattatttttcgtaagaacgaaatcataaaatttgatgcggcaaggacaatcatcgttgttaagcccattcctaatccattgacagaagaagttgttactgcaagagtaggacacattcctaacattaaaatcaaagttggattttcttttatgattccattataaagacgttcaacatatttattcatgattagcctccttgatttcctggttgattgctaaggctccgttaatagcattgttaaaagctgatgaagtaattgtagctccgcttagagcatcaatttcatcttcattttgcttaccagttttggtgattttaaaatcagttactgatttatgataatattgatttttaaaattatcatttttagcattcattcctaatccaaccgtctcatcaattgagaggacttcaattcccgtaatttcatcattagtatcaattccaacaactaatgtgatatcaccgccataaccatcttcagtagtgactttgacaacatgtcctattaattcttttttatcatttgtaacgactaaaacgtcgtctatcacaatgccattttcaccaaagttatattttttgtcttttataacattaggaaaatttttaacaagttgatttatttgtttattattatcaaaattttgaccttctttaaaaacacttcgataagaatcttgtatgattttttcattttgtctagcaattgggtctttggtaatagaattaaccatagctagagataaactagcagcaactgtaattacaacaaaaacgagaatatcttttagaagattttttttcattatgctttacctccactaccttttattttaggcactgttactttttcaatcaaagggacaagtaaattagtaatgataatagcaaatgacattccctcaggagtattaccatagagcctaaaaacagcagctaatattccaataaccagtccataaataattttaccggttggagtaatcggacttgtcacatagtcagtagccatgaaaaatgccccaatcattaaaccgccaccacaaatttgttgtaataaaaatagactgttaaagttattattgatcaaaatgattaaagaaaatgaaaataggatacacaacggtattttaggactaattacttttcgataaattaggtagacagcgcctaaaagcagagcaattactgatgtttcaccaatcgtaccactagtatttcctataaacattttgagaagattgacattttgtccattttgtatcattgccagcggagtagcactagtacttgcgtcgatgctaacaaagctgttcatttttccggcaaatgaaattaataaaaaacatcgagctgctaaagcaggattcataaagttctgaccaagtccaccaaaaagttgcttaacaattataactgcgaatatacttcccaaagcaaccatccacaatggcaatgagcttgataggcataacgctaataataagcctgtgatggctgcggagccgtctttaatcgtgattggcagcttcatcaatcgttgatacaaatattcacttagaacagctgtaataatagcagttgtaataacaagaaacgcattaaatccaaattgataaattccaaaaaaagttgctggtaataaagaaatgattacgtcatacataatatttttagttgtaattgaactacgaatatggggagcagtagacacattaaataaattatccattattttgctcctttcttgcgatcgtcattaattgctttttttatttttttaaatgattgtgtcatgtttcgctttgcaggacatgtgaaggtacagcagccgcactccatacaatcgttgccgtgaacctttaaaaagttttctttatcgcctgttctggcataacggtatagtaattgtggaataagaccgatagggcaaacatcgacgcatcggccgcagtgaatgcacgcagttggagcggttttagatacttcatcttcacttaggcaaactaaagcagaagaagttttagaaactggtacatctaaattaaataaagcagtacccatcatgggaccaccagaaatgattttttgaggatgtattttaaaacctccacaagcgtcaacaagggtctgatatttagttcctaggcgaaccttaaaattttgtggttgaaagattgcatcaccagttaccgttacaatcttttcaattagtggaatatttaaggcaacggcctcatagatagcaataatagatgcaacattgctgacaatacagccaacatcagctggcaacatcccatctacaattgtttgattagttaatactttaatcaatacgcgttcacttccttgagggtattttgttggtaaggctgctatttcaattttatcttcatctacaacgactttttttaaatgagctaatgcttctggcttattatcttcaatagcaataattgctttggcatttttaaataactgtaattgaattttgatgccagcgattaatttatctgtttcttctagcattaaacgatagtcagaagttaaatagggctcacattctgcaccgttgataattacatatttaattgagtcatcatctttaggggtattttttattgcgctggggaagccggcgccacctaaaccaacaattcctgcgtgagcgataagttcacgaatttgcatactgctataattatgataatcatttgttgtgttgtattctggaatactttgatattggtgatcgttagtaataacgatacaatcaacaaaaaaaccagtaggggcaagtcgtaaatcaattgttttaacggttccagagacagaactagcaacattggcagaaatcataccgtttccattagcaataatttggccaactaaaacatgatcacctttagcaacgatagctttagctggagcaccaatatgctgtgataatggataaatcagttcatcaccaggatttaatagtttgattggatgattggcggaaagacttttattatcatagggatggattccgcctttaaaacttagtattctcatttgaattaaactccttttttggactatattttaattatagactttttataattaatattaaatagtttagacaagttaaaaaattaacttaaaaagcaatcctttcaagaggattgcttttactagtttataaatgaaattgagattcatcaagacgtagactataaccttgtgggtgtttacaaactgggcagatcgttagtgcatcagtaccttcataaataaaaccacagttcatacacatccattttacagtagactggtcattaaataatttaccactggttaataaattatgatattttttaaaacgttcatggtgatagtgttcaatctcacaaatcatgtaaaaagttgttgcaatttcaacataaccttcttctttagcttcatcaccaaattgcttgtagatagatgttgcttcatcgtattcgtgttgtgctgcttgttctaataacgaacttaaatcctgatctagatcaacaggataattagcctccattgaaacattagcatctttaaaaacatctttaagataattgtaaaaaactatcgcatgctctttctcttgatttgcagtaaaataaagcatatcttgtaaaatagccattccattcttacctgcgactttagcagccatttcataacgcattcgagcttgacattcaccagcaaaagctcttaataaatttgttttggtttttgtttccatatataagttacctccacttttatttttaacaaaataaaagaagattaaacttaatcttctaagaatcaaataatctctttaataataattaaaatattataacgctgatatagatactgctaacaagacaaataatctagttgatcatatctttattcattccagttaattccatatattcagttttaacatttttcaataattgcataaatgtccaatttacatttgtttgagttacaattgcctttaacggaatgaaaggaatgtttgcttctttaaaaatttgtaatagcaaatcaacttgtttatcttcaaaaccagccataaccatcatgtcatcttgtggaatctctgttaatgcttcagttccacgttcaaaattatcagcacctaaaatatacccaatcgggctcattaaatcacttgatttaacaatgattacttcaacattcagtttttcaagaattgaaataattgctttaccagcatcagttttatcaatattgtataataatacagtttcttgcatatgtattgcctcgctttcgtttaataggttatcatatttatggttaacgttcaactaagttgacttaatgtgctataatttattcgggtaggtgagataatgcggtattatttagaaaaagaaattacaaatagttataaagaaggaagcttagttattgatattcttagtaaagaagatttcataaaccagtatcaaaaggaaaatcatgcaaaccatgtgattaggcatattggggatattatgtactgtaaagtagaattattttacgatgtgatttgcggagcgtttgttatacctgacaaaaaggatttaaaaataaaacattgttttagtttttatttaacagaacaaaaaatgatttttattgatgataacgattatgtgatgaaacttattgaaaaaatgaaagatacatatactaataatcgtctaagtttgaacaaattttttcatgatttgattttcttaataactgttgatgatggaatgtatttacaagaatatgctgatcgtttacaggtcatcgaagacaaaatagcttttaatttcaatagtcaaataaataatgagataatcttgctgcgtaaagaactattaattttaaattcctattataatcagttgggggatatgattgatattttaagtgataatgaatcagatttcttaaatgattatgaatgtcatttattcagcatgcaggcacgtaggattgatcgtttggataaccagttaaatgctttaaaagattattctttgcaaataaaggaaatgtatcaaaataaaattgatacccaccaaaataaaattatgactgttttaacagttgcaacaactattttcttcccgttatcgattatcacaggatggtatggaatgaattttaaaaatatgccagagttaaataatccttatggttatattattgttattggagcaagtattttagttgtaattattgaaatgttaattttgaaaaagaaaaaattcttttagaaaaaaatgttgacgtagtcaataaaaaaaggtatagtaaataagcaacaaatgatagcagcacatagagttttgaaaagagcgtttataacttaagtttgtagagtagctagctgcaaagtgaaatacttaatataaacacaattcaaataatctatgcaatgttattgttttatgcaaataaaacaataaatggaggaagacaaatgtcacgttacacaggacctcaatggaaattatctcgtcgtttaggattctctactttagaaaatggtaaagaattaaataagagagcttatgctccaggtcaacatggtcaaaaaagaaaaaaacaaacagaatatggtttacaattagctgaaaagcaaaaagtaagacatatgtatggagtaaatgaaaaacaattccataacacattcaaacaagcaggtaaaatggaaggtatccatggttataatttcttctgcttattagaaagaagattagataatgttgtttacagattaggatttgcacctacaagaagagctgcaagacaattagtaaaccacggtcatttcttagtaaatggaattaagactgatattccatcattccgcgttaaagttggagatgttattgaagttaaagaaaaatctaaaaatttagcaatcattaaagctagcttagaagctagagtacatactcctgcttttgtagaagttgatgatactaaattaactggaaaacttgctcgtttaccagaaagatctgaattaaatcaagaaatcaatgagtcattaatcgttgaatactataaccgtatgggataatccctacgggattaaactggtatatcttaactatgcagaagttaggatatacttttttttgaatttgattcttcgttagattattaattgctggtttaaaacgacagttttgccatcctgtttaaagaacgagcgcacaggttgatagcaattataattatttataaaatggtaagaaaattattttttattggtttaaattaaaataattaaaatgatattccggataaccctaagaaaaaatcatataaaattgaaaaaagtatttgcataaaaaattaatttaataatgtattaattttgataatttgatataatcaaattaatgtggaggtatgtatgacagatagtagaatttgtattgccttggattttcaaaataaggcagaagtaaaagaatttttggaaaaattcaatgatgaaaaactatatgtaaaagttggaatggaactattttatggtgaaggtattgaaatcatcaaaatgattaaagaaatgggacataacatttttttagatttaaaattacatgatattcctaatactgtaaaaagtgcaatgaagcaactagcaaaattagaagtagatatggtcaatgttcatgcttcaggaagtatcgcaatgatgaaagctgcaattgaaggattagaagcaggcaagacaggtgataaacgacctttatgtatcgccgttacatgtttaacatcacttgatcaagaagtgctagataacgagcttttaattaacgatacattagaaaatgtcgttttaaagtgggctactaatgctaaagaagcaggacttgatggtgttgtttgttcaccattagaatctaaagtgattcatgataatttaggaatggaattcataacagtaacgccaggaattcgtttagctgatgatagcgtaaatgatcaaaaacgggttactactccggcgatggcacgcgaattaacatctagttatatcgtagtaggtagaacgattactggatctgctgattcatacgcaacatataaaaaagtatatcaagattttcaagggtagaggagaagaataatgaaagaattaattgctaaagatttattagatattcaagcggtttttttaagaccaaatgaaccatttacatgggctagtggaattaaatcaccgatttattgtgataatcgtttaacattatcatatccaaaagttcgtaaagatgtagaaactggactagctaaattagttcaagaaaattttccagaagcagaatgcttaatgggaacagctactgcgggaattgctcatgctgcattagtggcagatattttggaattaccaatgggatatgtccgtggtggggcaaaaagccatggtcgtaacaatcggatcgaaggaaaagtagaacccggcatgaaagttgttgtggtagaagacctgatttcaacgggggggagttcattagaatgcgttgaagcgctaaaagaagccggttgcgaagtaattggaatgattgctattttcacatatggattaccaaaagcaacaattaattttgaagcggctgaatgtaaatatgtaacattgactgattatgatacattgatcggtgtagcaaaagaaaatgactatattaaagaagctgatatggaaaaattaaaggcttggaaaaaagatccaagtgacgaaagctggatgagtaaatagaaggtaaaaacaccttctttttttatattttccccctaaaataaagatattttaattgcattatcattgtgctataattataatgctattgttgtaaataaaagtagctttggaggtagaaaatgctaaaaagtattaaatatgttctaaaagagaatttcacaaatttatttagaatatattcaatttcgaaatatgaattattatctgatattcgtgattcccgtttggggattttttggaattttgctaatccattgattcaaattttaacatattattttgtttttggtttagtaatgaatcgtaaagatgtagatggaattccttttattcaatggatgttggcaggaatggttgtttggttttttattaatccttgtattactcaaggggctaatgccattttttcaaagacgggtgtaattactaaaatgaaatttccagttagtgttttaccggctacggtagttttaaaggaattatttaatcatgcctgtatattgcttttaatgattattttttattgtactcaaggtgtctatccatcaatcgagtggttgggaattatatattattgctttgcggcctgctgttttgctgtgagtttagcgatgattacatctgtgcttaatatgattgctcgagatactcgtaagttgattttagcgtgtatgcgtttgattttatatttaacacctattttatggccgatttctcgttttagtgaacagacgttattgtttgatattattcgttttgtcatgaaaatcaatccaatctattatattgtatgtgggtatcgagattgttttttatatcaccttggatttatgcattattggaaacaaatgctggctttctgggggattactggaatactgtttgttgttggctgttatatgatgtataaattcaaacataaatttattgatatgatctaggtggtagaaatggaaaattacgcaattaaatttgaaaatgtttcaaaaatatataaattgaaaaagaaaaatgatggtaatactaaaagtagtgaaacaaaaagattttatgctttaaaaaatattagttttgaaatcccacaaggggaagtagtagggattttaggaactaatggctcaggaaaatcaactctgtcacttatcttggcgggaattagcgaaatcgatgagggtgtcatgcatattaatggtgaacaatcattggttgctattaataccggtttaaataaacagctaacaggtttagaaaacattaatgttaaaggtgctttattaggactatcaaaaaagcagattcaggagattattgatggtgttattgaatttgcggagctaggagactttttatatcaacctgtaaaaaaatattctagcgggatgaaatcacgacttggtttttcaatctctttatatttaaatccagatattattatcgttgatgaagctttatcggtaggtgataaaggttttgcacaaaagtgcataaataaaatgaatgaattaaaagatgaaggtaaaacgattatatttatttcacattcattgcctcaagttcgaaatttttgtcaaacagcaatgtggattgagggaggaatgttaaaagaatatggtgaagtcggggaagtatgtgatcattatggtgaatatgttgattactataacagtttaacgaacaaagaaaaggctaaaataagagataataaatttaaaaaacgaattgttcaaaatcctcaaattggattttgggaaaaagttttagatcggataaaaggataggtgaaaataatgaagaaggttattacatacggaacatttgatttatttcatgtaggtcatttgaatattattaaaagagcaaaagcgctgggtgattacttgattgttgcggtaagtagtgatgcatttaatgcgcagaaggggaaaaaggcatatcatagtgatcatgatcgaaaattgattttagaggcgattagatacgttgatgaagttatttttgaggaatcttgggatcaaaaaattaaagatgttcaagaacatgatgtagatgtatttgtaatgggtgatgattgggaaggtaaatttgattttttaaaggattactgtgaagttgtctatttaccaagaactgatggtatttcaacaacaaaaatcaaggacgatctacataaataggtgtaaagatgaaacttagtataattatcccttacgatcgttacaaacagtatttacatgattgtctagaaagtatttatgaacagcggttaaatgattatgaaactttacttgttgtaaataataaaaatgagattaatcaagatatcaaagcgtatgatattaatttaaaaatccttgaagctggagaaaattctagtgttgctaaaaaaagaaatattggcttagaacaggcaagtggtgaatatatctattttattgattgtgatgattatttgatgccaaatactttaaaattattaattacttgtgctaatcaaaatgatttagatttagttgcaggaattagacgctttacatggttcaaaaagaaagtttttgagaccatgggtgatgaaaaaaataatgaattaaacttaaaagataaagatcatgattatgatgataaatttattgaaaaagtatatgaccaaaataatgttgatgaatatatggtagatgttttaattcggagccgacatgctattcgtaatatttctgtcttaaatgttttaataaaaaagaaactgattgatgagcatcaaattcgttttaacgaagattttttctattacactgatgttccttttgtaatccaattagttaattacgcaaagagttttgatcgtgttgaacaagcaatttttgttaaaagaaaacataatgatccaatcaatacacctgctttatcacaaataaaagattctgaaaataaatttgatgaatttttgatggcttatcgctatagtgcttctttagtagctccagatagttatattcgttattatttagattcgaaaatgcttagatattacacaaagttttttgcacgaaagattcggcgcagtaaagatgatatttggcgtaacgaacgatttaaagcaatgggagaaatattaaaaaatattcatcctcgtttattgaataaaagttctcgttatagtaaaaaaatgatcaaagctggtctaaatggtgatcttgagttagcaaagaagactgtaagccggcatttagcaaaaataaagtttaaaaagatcttaaaaaataaaaacgagatgaataaatatttatatcgccataaatatattaataaaccgcttgaagaaaatacggttatgtttgaaacttttatgggaaaaagttatgcagattcacctaaatatatttatgaatatttagcgaagaattatccaggtaaatataagtttatttgggtattaaatgatcctaaagaaaaattgccttacgaaggtaagattgtcaaaagattcacaagggaatatgcttattatttaggcgtttctaaatattttgtttttaatattcgtcagccattatggtttagaaagcgtgaggaacaagtttttttagaaacgtggcacggaacgccactgaaacgtttagcgtttgatcaagaagaggttactgctgcttcgccgacctataaagctcaattttatcgtcaaaaacaagaatgggattatttgattgcaccgaataaattctctagtgatattttcaaaagttgttttatgtacgatggtaacatgctggaaacaggatatccaagaaatgatttattatcgttaccaaaccgtgatgcaatagctttagaattgaagaaaaaattagggattcctctagataaaaagactattttgtatgctccgacatggcgtgatgatgagtattatggaaatggtaaatataagtttaaattgaaattagatttagatttattaaagcagcagcttggtgatgaatatgttgtattgttaagaacacatcattatattgctgatgcattagatgttacgggactagaagagtttgcgtataatttgagtaagtatgatgatattacagaaatttatttaattagtgatatttgtattacggattattctagtgtgttttttgactatgctaatttaaaaaggccgatgttattctatacgtatgatttagataaatatcgtgatgtattaagaggtttttatattgatatggaaacagaattaccaggaccattggtttatactactgaagaagttattgataaaatcaagaatctgaatagtttgaatcaagaatatcaacaacgttatgaacaattttatgaacgtttttgttcatgggaagatgggaatgctgctatgcgagttgttgaagcagtttttaaataaggggtttaccccttatttttatgggaggaaagtaaatgaaaatattaaagaaactactcggtaagttaatcagaattttatatcgattcgtatatcgatttattccttgtcaggaaaaaacaattctttttatttcttttcatggtcgcggttattctgataatccaatggcaattcaccaatatctttcaaaacattcacaatatgctgattatcgttgcatttatgcaataaaaaatcataaacaaaaaaaattaaaaattgaaaatgctagaattattgagtattttagtattgcttattttttctatctagcgcgtagtaaatattggattgctaattgcaagctcccaaaatatgttttgaaaaaagatagccaagtttatttacaaacatggcatgggacaccattaaaaaaattagcacatgatattgaagttccagaaggaacaaccttttatcgtagtgaaatgagcgttgaagaaatgcgttcaacctacgataatgatgtaagtaagtataattatatgattagtcctagtgcttttacaactgaagtctttcaaagtgcttttgcgattgagagagagcgcttgattgaaacgggatatccacgaaatgatattttatcaaattataattctgatgatataaaaaaaataaaagataaattaaatttacctgaaggtaagaagataattttatatgcgccaacttggcgtgacaattcatataatttaaaagggtatacatttaaattagaagttgactttaaaaagtggcaaaaaattctaggtacagattatattgttatttttaaaccccattatttaattgtaaatgattttgatttagaggcagttaaagaatttgtctactacattgatcctaaagaagatattagcagcttgtatttaattgccgatgtcttagttacagattattcaagtgtattttttgattatgcaatattaaaacgaccaatttatttttttatgtatgatttagacacttatcgtgatgagttaagaggcttttatttagatatttatcatgatttaccaggcgatgttattgaaagtgaggatgaattgatccaaaaaattttctctgaaaaatttgactataatcgattgcaaatatttaatgaacagtttaataatcatgaagatggcaatgcgagtaaacgggttattgaaattttattaaagtaggtgatgagatgggaataaagaaaattattattaatattatcttaaaaatagccaatatatttgttttaagatgttcaatcaagcaaggacaaatagcctttatttcattagagtcgaatcaacttgaaagtgatcttgaacttatttatcaggagttaaaaaaagaaaacaaatatagtttaaaaatggtattaataaattataataaaaaaagtttaattaacaattttttgtatatgttaaactgtattaagcaaatttatgtaattaatacttctaaagttgttttgattacagacaataactatgtaattagtaattttaaacgacctggcgttaaagttattcaggtatggcatgcgactggagcaatcaaaaagtttggaaatgctatcaaacgtgaatatcctattaaaaattatgactatgtgattgcaaatagtgattattggaagcagccttatcaagaagctttcaacgtttccgagcagggcgttattattacaggaatgccacgtgtggatcatcttgttgatccatattatttaacacaagcgaaagcacgtatgtatagtagatatccgattctaaaaggaaaaaaggttattttatatgcaccgacttttagaggaaatatttatcagggttttaaaacagttgactttgatgctcaagcagttttaaatgcactgggagaagaatacgtaataatctttaaatttcacccattgttattgaaaactacgctatcagacgattctagagtgattaatatgaatcatgaaaatactcatgatttattcgcagtttgtgatgtcttgatttctgatttctcatcaattatctttgattattccttattaaataaaccaatgtgtttttttgttccggatttagatgaatatattgaaacattaggatgttttgtggattatcgaagggtcatgcccggagcaatctgttataatgaaacgcaagttattgcagccttgcaaggtaataaaaaatatgatattaaggcatttagagatatgttttttaaatatcaagatggtcataatacacaaagaattgttatgtttatcgataaattaataaacaccaagaattaattcttggtgtttatttaatgattttcattcgccaaataatcacggacatttgataaattgtccatgatcttattagtcattatcgcaaacttatgatcagggtattttaaatcaggaatacaaattactttaatgcctgcactataggcagcgttaattccggattcagaatcttcgagaaccagagcttcatcgggcgtaattcctaatttttggcatgattttaaaaatacttcaggatcaggttttccttttgttacttcgtcaccacaaatggaatcatcaaaatatttttgtaaaccagataattctaaaatatgatcaacacgatgacgctgtgaactggttgcaacaattgttttatagtcgttttcttttaaatactttagtaactcaattaatccttcttttaaaggaaccccttcattttcaaataagtcagccatatattgatgaactgctttaattgtttcctcaacatcaaaatcgtcgccataatctttatggaaaagctcatagactgctttaacaggctttcctaaaagagttttataggcttctaatgataatgttaaattatgtttagctaatacatgcttatatccctcgaatgtaactctctcactatcaatcattaaaccatccatatcaaaaattactgctgttatcatctttttacctccacgcaaatatcatatcataattatccgattagtaaaaagattttcatagaataaaaaaagttctaattcatatactgcactaaaggagttgtagatatgatacatagaggggaaatttattatgctgatttatctccggtagtggggagtgaacaaggaggatatcgacctgtgattgttttacaaaataataagggcaatcgatattcgacaacagtgattattgcgccaatttcttcacgattaacaaaaaatccgttaccaacccatgtgatggttgattgcagttcattggaaaaaaagagtgtagttttactagaacaaattagaacgattgataaacagcgaattaaagaaaaagttggaatgattgatagccaagtaatgaatctgatcaatcaagcaattaagacaagcttggatattaaatagtttccttttgagtcagatatttgctataatagccccatggaggtagaggaaagatgaatgttcgtgatattaaattaaaggctaaaagtgttttagttaatcgtaataatatagttacagtatttgtgtttattagtgtaataacaactttggctaattatattggttcagaaattggcggggtgataccatttctttcattgattgtaactattataatgttgccctttggtcatgggaatgtggtaactgcattaaaaacagtcaatgaacaaggtgatgaggtcactattgaacaagatggggtagtcggattaagacgttttaaagatttatttggcacatattttattagagaaatattattattggtgattatgatgctgcttggattaatcatattcgtaattgctagatttacagtagacagtaatgttttttctcaattaggagcaattattgagcaagctgctgtatactctactaatgtaagtgcatatttaaatgatccaactgtaattgaagcattaggaacactaggagtaatcttttttattggtatcatcattattgcaattgtagcgtttatttatagtttggtatttgctttaacaccttttgtattagaaaaatataatatacgcggtgccaaggcaatgagtgaatcagctcgtttaatgaaaggacataaacgaactttatttatgctgtatttgtcatatttaggatgggctatcttagtattagtactttctgctgttgttgagatgattttaccgattccattaattttgaatattatcgtggcggctttgactacttatttgtttggtgctgaactaaatactagtttagcagtattttttgaagaaattgatttagaagataaaaataatatttaacgaggtgttaatttgaatttgataaaaaaaattaaattaaatagtaggcaaaaggcgataggggtcatattgatttttccctggtatctttattttgcaccaattgtaattaattattttttgaagctatatacagtatatatagctaatgatttttcaactaatagtttaaatgcattttttaatttattcattggaattgcaactgctattcctttgattattgtgtttaagggttttattaaagaaaactggcttgtttttaaaaaagactttttggaaaatataatatgggtgcttacgatcgggattggtttagcatatttattttcaattgcaggggaactgattgtcaatcttgtagcccctcaatcaggcgaagcagctaaccagacattagtggaaactcttgtgcaatctaattttctattaatgttttttcaatcagtaattattgcaccatttattgaagagttgttatttagaggtctgattttcaacagtttacgacaaaaaaatatggtttgggctcatttgatttcagcattcctatttggcttgttacatgtttacagctatattttagctggtgatatgagtgaatggattaaattgattccatatatgatggcaggtttatctttttcaatcgtatatgaaaaacgtcaaacaattatagctccgatcattttacatgctgcaaaaaatctaatcgcagtattgttaatggcgacgatgttttaaacactatgcatgacatagtgttttttattttataataaaaaaaccgtaaaacttatataaataagaattacggaaatttattaatggtctcccctcacggtctcgaaccgtggacccacagattaagagtctgttgctctaccaactgagctaaggagagaggacagatattataatacacctatttaaacataaaagcaagttaaatttaatgaaaaatgacattagctatgctataattactaggtgaatggagtgatctggcaatgttctacaaacaaactattaacaatataaaagtagttattttatcattggatggaggattattagatctaaatcggcttagatttaattattttaaaaggatttgtaaaactcacaattttgaattaactaaagatattttcgaggaagcccttggaaatatgaaaacaatgtataatgattttccaatttctaaagatattaatcccgatgatattaataagttgattgaacgtgatttatacgagtatgcaaagttaaagcctgagacaataaaaaaagagggaacggatgaactgttacaattttttaaacaaaaagagattaaaattgctgtggtttcaactcataaaacaaaacgtgcaattcaatatttacaattaacaagattgtatgacaaagttgattttgttattggcggcgatagcgataatctaccattaccagatactgctgttttaaaaacaactcttgaacaaatgaactgcaaaccaagtgaggcaattgtaattgcaaactatccaaatcttctttatgcagctaatcaatgtttaatcaatgtaatttatctaagtgatttatgcttggtacaagaatcgattggtccaagggtatttaaaattgcaagaaataatttagaaattattaatatttttctttttgcacgttacgatacaatggaaatattttcgccgttattagggatgtctagtgatatggatattgaaacactagataaaacatacgctaagctgcttgaagagtatcaaaatgatcagcagttgattgaactagttcgcaatacatatcattattttttgggagaaattgcaaatcgtgaagctgataccgtcaatacatcgttatttgaagatgaagatgttattgtagcgacagtggatgatgaacatttttctaatccccaaagtattgcaactttggaaaagtcaattgaagaggttttagagtcagaagaagtttcagaaactgacaacgaaattgccgatactgtttttaaaagagagaatttatatcaggatgatgaattttcaaaaacaagaacagcgataggatgtgatcctgaacgcgttaatgaattgatggatattattaatggtaattctggaaccaagttggaagagggagaattatttgaaaagtcaaatgatgaaatattattagaaaaacggggactattgtcttattttattaattttgtctatactgttatcgtggtgggactgatatcatttttaggattaataatttttatcggttttgaagattttattcaaggaccaggtattgttgctggaataattaaaaacattattgatttttatgttaatctagttttatccatatatgcggttatttttaacagcttaaatgctctactaagttttattcctgattattctagtttaattgcgggtaatggtttattatcgacaatggcagtaaaattagtattgttcattatttttaatgtaataatagtctatatagttaaaatgatttatttattaattacagaagcggaggaagatgatgcgaattttgcagaagattaaagaaatagatgttaaaacatcgcacttttttccgcagttttatcatcatcgtttttttagtggtgcgatgaagtttattgctggaattggtgattttggaatgatttggcttgttttaattttacttttaagtcttaatgataaaacacagctgctttctcaaaaaatgctggcagcgctaatattagcaacagtcatcggtcaagtgacaattaagtcgattgtaaggcgtaagcgaccatgtcatacatatcatgatgttgaaatgttgattccagttccgagtgattattcatttccttcaggacatactacttcaagctttgcatgcgcaacgactgtatgtttcttttttcctagagtcggctttatttgcatgatttttgctgcattaatggctttttcaagattgtatttgtttgtccattatttgagcgatgttacttttgcaattgttttgggaattagtgttggaataattgttatgttattttagtgtgataaaaggagcaagggtctgctcctttaaaaaaaataaaaaaattattttttaaataagactgatttaaacgaaataatttgcttttttatcaggtggagtaagtttttatagaaaaaaagttggctaaaattattgcaaaaactttttacatatgatattatgtttaagcaatagacggagacatactcaagaggctgaagaggcgcccctgctaagggtgtaggtcgggaaactggcgcgagggttcaaatccctctgtctccgccattatattggtctggtagttcagttggttagaatgccgccctgtcacggcggaggtcgcgggttcgagtcccgtccagaccgccaattagattgtttagtttcactttggtgaaactttttttataaaaacaaatcattatgatttgtttttattaatataagcatgcaaaattgcaatcattgttttagaatcaaagatttcgccattaactactttgtgataagcggtatcaatatccattttaattaattcaattacttcatcttcatcacactctaaaggattttcgactttgtaaacatcatgagcttcgtatacataaagccattcatcactataaccaggagttggtaaaaacttagaaattaaacttatctttttagcactgtagccagtttcttcttctaattctcgtaaagcgcatatagcagtatcttcatttaattctaatttacccgcaggaatttctaaagtatctacagcattaggataccgatattgctttactaataaaattttgccatcaacaatagcaagaacgccaactccgccgtggtgtcgaactacttctcgagttgcgagattcccattttcacattctactttgtctttataaacagtgataatttttccatcatagattatttctgatgatattttcttttccattagtttcacctcattaaaagtataacaaaaaaagtatgcgggggtgcatacttttttctattatttcacgtaagggtgataatagggggtatgtaaagcgaaatacttcacttaacaaaatcaattatagcatcagtttcataaaatgtaaagggttacaataaaagtattaggcgtttttagcaaattttgttataatgtttcaaggtgatataatgaaaaaattaaaaataacagaaaatgatgctaatcaaagaattgataaatatttaaaaaagttactagttaatgctccaaataattttatatataaaatgtttcgaaaaaaagatatcaaagtaaatgggaaaaaagtggatgaaaaatatattttatcattagatgatgaggtcgaaatgtttttatatgatgataaattcaaagaatttacagaaaccaaaagtatctatgaggtcaataaaacgtttagtgttctttatgaagataaacatgtattgattgtttttaaaccagcagggcttttagttcatgaggatgcaaatgaaagcattaatactttaacaaatcaggttttaagttatcttgcttcaaaaaatgaactagatctaagtcgagaaaatacttttatgccaggaccagttcatcgtttagacaggaatactagtggaattgtaatttttggtaaaactttggcagctttgcaaaatctcaatgaaatgataaagcaacgtcattgcattgaaaaaaaatatttaacgatctgtcgcggacaattgagtcatcagcgaaatttacacggatatatggtcaagttagagaatcaggctcaagttaaattagtaaagaaagactatcctggggctttaacgatggaaacgattgttaggccgttaaaatataattgtgattatagtcttgttgaggttacattaataactggacggatgcaccagatcagagtacatttatcaagtattgaacacccaattattggtgatcgtaaatatggagattttgaactgaataaatatattaagaagacttttggtttaaataatcaattgctgcatgcttataaaataaaatttgtaaaaacctttggtgtactaaattatcttcaagataaagagataatttgccctgtgccggctttgtttgaaaaaatagagaaaagtttgttatagacacctttaaataaagagttgtttattgtataattatttacatagattataggaggaaagatatgaaatactatattggaattgatttaggtgggactaatgttcgtactttgctggtggatgaaaatggtaaaacttatagtgaagtaaaagataatactgaaagagaaaatggtcctgactatgtatgtgctaaaatcattcgtcaaattgaaagtttagatacatcaatttgtggtggtttacaaggtgtaagtggaattggtattggggtacctggacctgttgacacagtaaaaggtacaatgatcatggcaacaaatttacctggattcgaaaattatccaatttgtgataaattagcagatcgttttaatttaccaacttttattgataacgatgcaaatgttgctggattagcagaagctttattaggtgctggaaaagattatccgacatgttattatgtgactatttcaacaggaattgggggagcctttattgttgatggtaaattagtttctggtggtcgaggacatgctggagaaattgggaatattattgttaaaaacaatggttataaattcggaggtttaaatccaggggctgctgagggagaaactagtggtactgcaattactcgtaaaggtaaagaacttttaggagaagatagagtaaatcatgctggagatgtttttagattggctagcgaaggtgatttaaaagcacaaagtatagttgatgaatgtatttcagaattagcaacaatgtttgctaatattgctcacactgttgatccgcactgttttgtaattggtggtggtgtaatgaaatctcgtgaatatttctatgattgcttagtagaacaatttaactcaaaaattcatgtaggaatgcgcggatatattccgttattaggaacaaaattagaagattgtggagcaatcggagcagcaatgttaccaatgtcaagattaggttaagaaaggatatttcatcctttttttttgatttaaagtagtagttttttaaatcgaataatggtattatagtacggtgaggtgacgagaatgtcaaaaagagtagtattaggattaagtggtggtgtcgattcagcagttgctgcttatttgttaaaagaacaaggatatgatgttattggtgtgtttatgcgtaattgggatagccagttaaataatgatattttaggtaatcctactaatgataatgatatctgtccacaagaagaagattataatgatgccaaggctgtagctgaatgtcttgggattcctattaaaagggtggattttatcaaagagtattgggatcatgtatttacatactttttagatgaatatcgaaaaggtagaacacctaaccccgatatattatgtaataagcatattaaatttaaagcttttttagattttgctaaaactttaaatgcagattatattgctacaggtcactatgcccaagttaaacattatcaaggagcagattcggtgatgttaaaaggccttgataataataaggatcaaacatactttctatgtcaattaaatcaacaacagctacaaaactcattatttcctttaggtgaaatagataaaacagaagttcgtcgaatcgctagagaattgaacttaccagtagcagataaaaaagacagtaccggaatttgttttatcggagaacgtgattttaaagagtttttacaaaattatattccagctcaagctggaaaaatggttgatatagaaactgggaacgtgattggtgatcattcaggaatcatgtactatactattggtcagcgtaaaggattagggattggtggtccaggtgatgcatggtttgtcgttgggaaagactatgataaaaatgtgttatatatttgtcaaggagatcaaaaagattggttatattcaaccggggctctgattactgatgtgaactggattccttcaactaaaccaatagataaaattgcatgtaacgctaagtttagatatcgtcagccagataatccaattcaacttgaatttattgatgaagatactgtttacttaacttttgataaaccaataaaagcggtgactccaggccaagctgcagtcttttacgatggtgatatttgtcttggtggtggaacgattgaaactgtctataaagatgggcagccaatcaagtatttataatgattgaatatacaggttatattaagaagattcgtttttatagcgaatcttctaattatatcgttgctttaattgaagttgagcaggaagataagttgatcacaatgaatggttatatgaataattttaatgattatgaaaaatatgcttttattggtgattacgaaattcatcctaaatatggtaaacagtttaaattatcagaatatcgtatcatttatgcaaaagaaagtgaagaaattattaaatatttatctagtccgctatttaaggggattggtaaagctttggcaacacaaatagtaaatacacttggtgaagagtgtcttgaaaagattaaagaagataaacataatttagatttggttagaggaatgactgaaaaacggcgggaaataatttatgaagcattgactaatggtgattatgatcaagaagtaatgcagttttttatgggacatggtatcagtctgaaaaacttgggcttgattcaagcatattatcaagaaaaaacattagaaatacttcaaaacaatccgtaccaactagtagaggatattgatgggattggatttaaaacagctgatgagttagctttaaaaacaggtgggacacttgataatcctaatcgaattaaagctgggattatttacagtattaagcaatatgggtttaatactgggagtacatactgttaccttgatgaaatcaaaataatgttttctaaaataatatataatattgaagaagtatcgtttaatgaatatcttgatgaattgattgatgaaggattgattattcaacgtggtgataagtattattattttgaaatggatgaggctgaaaaaaatatagctgaatatttaaaaatacggataaataaacccgatgaactttttgatgaaaaagaagtagaacgattgttgacaaattatgaaaagactcaaggtatatgttatgctgccaagcagaaagaagccctaaattattttttaaagtcttcttgcatgattttgacaggcggacctggaactgggaaaacgacaattgttcaagcacttttaaaagtgtattcggcattatacccagatgatcgaattggtttagttgcgccaactggtcgggctgcaaaacgattgacagaattaactggaatttatgcttgtacaattcatcgcctattaaaatgggatcttcatagtaacacatttgctatgaataaaagcaatccattagatttagatgttttgatcattgatgagttttcaatggtcgattgtttattgttgagtaaactttttgaggcgggtcgaggaatcaataaagtattatttatcggtgattaccatcaattgccttcggttgcacctggaaatatattacaggatttgatggaagctggagtgaaaacgattgagctagatgaaatcttcagacaagctaaggattcaggaattattcaattggctcatcatattattcataatgaaattgaaaatatggatctttttgagcaatatcgggatataaacttttttccttgcataaactatgatgtcgtaaaaaatgttaagataatagtaaaaaaagcaattgacgaaggttatgacacaaatgatattcaagtactagtaccaatgtatcagggagtggctggaatcgatgctttgaatgatgctttacaagatgtttttaatccgattgatgaatttaatgattcatatcaaattggccgcaaggaatatcgtgtaggtgacaaaattttgcagttaaaaaatcgacctgatgatgatgtttttaatggtgatattggaacgcttgttgaaatatgtcgaaaagataattttgaatatttgcaagatacactgattgttgattttgatggtaattttgttgaatatacaagtaatacttttaacacaattactcatgcttattgtatgtcgattcataaatcgcagggaaatgaatttaaaatcgttattatggcggtcttgtctgattattatattatgctacggcgtaatctattatatacagcgattacaagagcaaagcagtctctctttattttaggaagctctaaagcttttatgcatggtttagcaaattatcaagacagtcgtcgaaaaacaagcttaaaaagtcgttttaaaacaattgaaaccttaaatgtgtatgattttcttgaataaaggtaaactatactgaggtgagatatatgatgacaagaagcaaaatactaattggattaacagttgcatcactaatgattttgttgagtgaatgtgagtgtgttgaagatatgatgtatgaactcaaagcaaagatgtaaagatataaattaatagtcttgaaaaatataattggatagtttataatttggtaaatcgttgaaaaagaaaagtactataaaatagatctttcagagaaagtatggctggtgaaaatacttatcattttataggaaagctactttggagagtaattaaagattaccgtgtaggctacgttaccagtcaagtaagggcatgagttttcatgaactaggatggtaccgcgattaaagtcgttcctagcaatagggcgactttttatattgtaaaggagaacaagatgaaacaattaacaggaaatcaagttagaaaaatgtttttggatttttttgaaagcaaaggtcataaagttgaacctagccactcattaattcctaatgacgatccaactttactatggatcaatgctggagtagcagcaattaaaaaatattttgatggaacaataactccagataatccacgaattacaaatgctcaaaagtcaattcgtactaatgatattgaaaacgttggaaaaacagctcgtcatcatacattttttgaaatgttagggaacttctcaattggtgattattttagaaaagaagcaattgattttgcgtgggaattattaactgatgaaaaatggtttgcttttgaaaaagataaattatatattacagttcatgatcatgatgaggaagcttatgactattgggttaatgtcaaaggtgttgctgttgatcatatgttaaaaacaccaggtaacttttgggaaattggcgagggaccatgtggacccgattcagagattttttatgatcgtggggaaaaatatgatcctgatggtttaggaacaaagttgttttatgaagaattagaaaatgatcgatatattgaaatttggaatttagtattttcacaatataactcacaagaaggagtagctcgtgaagattataaagagttgccacaaaaaaatatcgatactgggatgggattagaaagaattactagtattattcaaggtggagaaacaaattttgatactgattttttcttaccaattatccatgaagtagaaaaattagccaatgtttcatatcaagaaaataagatggcttatcgagttattgctgatcatatccggactgtaacatttgcacttgctgatggagcattatttgataatgcaggtcgtggatatgttttgaggagaattttaagaagagctgttcgttatggtaagcaaattggaatcgaaaaagcgtttatgtatgatttagttgatgttgtaagcgaaattatgaaagaattctatgattatctaccagaaaaagtaagttatattagtgacttagtaaaaaaagaggaagaagcttttcataagacgttaacaaatggtgaaaaattattaagtagtattatcgcaaaaaatactgatggtgtgattagtggaaaggatgcctttaaattatacgatacttatggttttccttttgaattgactttggaaattgctgaagaatcagatttaaaagttgatgaagaggcttttagagcagagcttaaagtacaacaagaaagatcgcgtggagcacgtactgatagtgaaagtatggcaagtcagaaacctgatttaatggcctttgatttaccatcgaattttgaatatgatccaacaaatatcaatagtgtagttattggattatttaaagatggtgttaaaacagatcgaattgatgattatggagaagtcatttttgatacaacaactttttatgctgagatgggtggtcaatgtgcagatactgggtatgtttataatgaaaattgtcagggtgaagtaattaatgtgctaaaagcaccaaatcaacagcatttacatttcgttaaattgaagacaggaacgattcgagttggtgatattttaactttagatgttgataaagctaagcgaaataagattattgctaaccatagtgctactcatattcttcaagcagctttaaaagaaattattggaaaacatattaatcaagctggttcttatgttgatgatcatcgtttaagatttgattttactcattttgaaaaaataacaaatgaacaacttaaattaattgagaatcaggttaataatgtcatttttgatggagttgctgtggatattgcacacatgactaaagatgaagccattaatagtggtgctatggcgttgtttgatgagaagtatggcgataaggttcgggttgtttcaatcggtgattattcaatggaattatgtggtggatgtcatgtttcaaacagtgcaaatattggattatttaaaattgaggctgaagagagtgttggtagtggagtgcgtcgaattgaggcggttactggaaagactgcttatcaagcgttagttcaagaaaaagaaacggttgatattattagtaatattttaaaacttaaaaatcgtaaagaagtagttgcaaaagttactgcattaactgaagaactttccaacactaaaaaagagattgaaatattaagcggacaattaaatgcgctaaatgcagcaagtaaagccaatgatattcaagaaatcaatggagttaaagtgttgtttgtagaagaaatgattgatgctgctaaagcgaaacaacttgcctttgattttagagataaaattgaagaaggaattgtaattttagtaacacaatttgaggacaaatgttcatactttgtcggggtgactaaaaattatgttgcaactggatataaagctggtgatattattaaaaaaatcaatgcagttgttgatggtcgcggtggtggaaagccggattttgctcaaggtggctgcccaattaatgataagatttccaacatcaagggagaacttaaaaatttcttttaatttctaagtaattggtgtaaaataattttataggcaaagccttaaaggaggtcgaataatatgcaagacttaacaaagacaaaagtattcagttctgaagatatgcgtcgtgagatgattcgtcaaaatcttaaaacagtaattgatgcattaaatgaaagaggctataatgcagtacatcaaattgcaggttatttaatctctaatgatcctgcttatatttcaagtcataaaaatgctcgaaatataatccagcaaattgaacgtgatgaaattattgaagaattagtcaaatcatatttggagaagtaggatggaacggatattagggttggacttaggttcaagaacctgtggtattgcaatcagtgatactttaggcatgttagctcatggaattgagacttaccgttttcgagatgatgattatgatagagccgcaaagcacgttgttgctttaattaatgaacatcagatcaaaacggttgtacttgggctacctaaacatatgaatggtgatttgggtgagcgtgcacaaatatcaatcatgtttaaagaaatgttagaaaaagaagtaccgggtctcaatgttgttttaattgatgagcgacttacaactaaagtagctcaagatcaacttatctttgctgatgtttctcgaaagaaacggaagcaggtaattgacaaaatggctgcagtagcgattttacaaggctacttagatgcccaatagaaaggaatttaaatggaagcaaataaaatccaagtgatcgatgatcaaggtaatgaaaaagaatttgaagtattatttacttttaataatgaggaattaggaaaacaatatgtgttgtattatgatacaacagttgaagaacctagtgtatttgcatcaatctatgatgatgctggacaattattccctatagaaacaccggaagaatgggaaatggttgaagaagttttccaaagttttatggctgaaagtgaagaaggtcatgaatgttgtggaaaccatggaaatggatgctgtcatgataatgatgaagaacatgaatgttgcggtaatcatggagactgtaactgcgataactaataaaagctaaattatttagcttttttctcttaaactagaaaaggtggtatagaaatggctttaatgggattatttggaaaaaaaagagttactgaatcattttttgtcaattcatatggaaatgatcagacacgtggtatttatacatttcaagtagatattgaaaatggagaaatactttataaaaagcattttaaaacaccctcagaccctgtctatagctttaattatgggcgctttgtgtgtgttacatataaaaatagaacaggtacaagtggtgatggtggaatttgttcatatgcagcaactgctgatattttagcattagtatcgcgaattagtgataaaggtaaaacatatatgcatgcttgtgctaatggtgatcatgaaacagcagataaattatatgctgttgattattataacggtgagatcatggtggcaaaaattgataagaaaaaactagttgcacctatttttaattataaattggaaggacatagtatcgatccaaaacgtcaaaatcaaccacaccctcattttgtcgattttactccggatggaaaacgtttaattgttgttgacttaggattagataaagtactgctctttaaaatggaagcaaaggagattattttggatgaagaacattcatttgatttagaaccaggatctggacctaaaaagattatgttcaaccaggctggaacaatagcgtatgttttaaatgaattatctaatacaatttgtgtttacaaatataatgatttgaaatttgaattaattcaaaccatcgatacatatccaaaagatgaatatgatgagcctagcttagctggacaaatgctttttagcgaaaaagaggagcgtatttttgttactaatcgtggtcatgatagtttagcattatttttagtagatcaagaaacaggtttattgacttataaagattttgttgatacttcaccaaatgctcgtgatattgcaatctttaaagatcgttggattgttgcagtttgccaaaagggtggagtagttgaaagttatgaataccgcgatgaaagaggcggaatgctttttgaaaccaaatactcatatctagtcagtgagccggtttgcattacaaaatttgagactatttattagagatgattattcatctctttttttggcataatatactgacgaagcatgttttattatcggtagataagttgaataagcgctaaaaatatcatataatggttaagacggaggagaatatgaaaaaaactcagaaaattattattggagcaattgctggaataacgattgttgtactagctttagtgtttttttatttcaatggccaaggtgctgtttcttctaaaagtgaagaggtagtagttgaaatatctggatcaacatcttcggtcttaaatcagcttgataaggcaggtctattaaaaagcaaaactgttgctagtatctatacaaagtttaatagttatagttttaaagcgaatgtttatgttttaaataaaaatatggatttaaagaagattcttacaattttggaaggagataaggattatatatctgctgctaaaattacgatattagatggataccgtatacctgaatgtgctcaacaagtagcaaagggattagaaatcgatagtaccgaggtattagagaaatggacaaataaagaatatttgcaaactttagtggaaaaatactggtttttggatgaaagtattttgggtgctgatattatgttcccgttagaagggtattttggtccagaaacatatgtaattacttcaaagaagacatcgattgaagatgttacaaagatgatgctggatcaaatggatcgtaatttaagtacttataaagacaaaatcagtaattttatgattagtggtaataaagtatcgatgcatcaatttttatcattagcatcagttgtacaatgtgagtcatctggccaaaaagaagatcaggctaagatagccggtgtctttatgaatcgtttggaaaaaccaatgcgtctgcaaagtgatgtaactgtaaattatgcaaatcaaattaaaacggtagcagtaacgtataatcacttatcagtcgattctaaatataatacatataagtatgaagggttaccagtcggtccaatcagtacagtttcaacaaacattattgaagcatgtctgaattatcaaaagactgataatttgttcttctttgctttgaaagacgggtcagtcatctattcaaaaacatatgaagaacatcaacaagtagtaaaggaaaataaatggtattaaaatgagatattatgaaaaaatagaagctgatgctttagcccgaaatatacctgtaatgcagcgtgaagggcttgaatttatgattgaaatttttaaacatcataattgtcattgttgtttagagattggtagtgcgattggatattcagcaatgatgttggtaagtaatattaataattttaaggttgaaacaattgaattaaatgaggaacgatatttagaagctgtaaaaaatattgaagaaaataatttaaaaagtcaaatcattattcatcatggtgatgctttatcatttgatttagagcatttgaaaattaaaaaatatgattgtttgtttattgatgcagctaaagcacaatatcaaaagttttttgaaaaatatatgcctttagtggcagacgaaggtatttgtattgttgataatttagattttcatggtatgatttttgatattgataatataaagaatcgaaatacaaaacaactggtaaaaaaaataaagcgttttaaagattggatctttgataacgaactttatgatgttgaatatcatcatgttggtgatggtatttgtgtgataagaaaaagggtggcacaatgaagttagtattatctttaaatagcaaaaaatttatttatgattatgtggatattggtgttgaatattttgtcgttggggcaaagtatttttcatgtcgtcaagcattatcgcttgagtatgatgaaatcgccaatttaaaaaaggtcctaggtaataaaaaagtatgggttttagtaaatgcactagttgaagaaaaatatatcgatttcttagaaaagcatttaattagattgagtcacattggagttgatggaattttatttcaagattttggtgttttacagatttgtaatgagcataattttgattttgagatgatttatcatccagatacattaaatactaatcaagcaactttaaattacttgggaactcaaggtattaatggtgcttttttggcacgggagataccgcttgaagaaaaaaaaataattgctaaaaatgttaatgttaaaacaatgattcaagttcatggtgttgaatatatggcatattcaaaaagaaagctattgactaattattttaaggaaatcaatcaggatattccaattggaatatcagatgatctgacgattcaggcaaatggtgtaaattatagttgtcatatttatgaggatcaatatgggtgtcatattttgagtaaacaacaaatgtgtggcttagacataatgagtagttttcaagattttgattacctctacatagaatctttatacgtcgatgaattaaagttagtagaaatcgttaatttatatcaagatgctttaatcagcgttggaaatagaacttacggaaaagtcgctaaggaattaatatcgcaactttatcaactggatccaaatatcgaatatcatcatagctttatgtttgatgcaactgtttataagattgatgatgtaagaaagcgggaagaaaatgagaaatgtaagtaaagtaattaacggaaaaagggtaataataaaaaaacctgagttattggcaccagctggtaacttagaaaagctaaaggttgccattcaatatggtgctgatgcagtttttgtgggtggaaaagaattttcattacgttctggagcctcaaattttacacttgatgatattaaagaggcagtaacctttgctgatcagtatggcgctgcggttcatgtgacatgcaatattattctacatcaagataatcttgatgggattgaagaatatctgcgagctcttgatcaagcaggtgttagagcgattattgtggctgatccatatattatgtcaattgctaaaaagttgaatttaaaattagaagttcatgtttcaacacaattatcaactttaaatacaaaagcaattaaattttatcgaaatttaaaaatggatcgagtagtgcttggtcgggaagtttgttacgatgatttgaaaactattttagataaaactgatgtagatattgaatattttattcatggtgccatgtgtattcattattcaggtcgttgcatgttgtctaattatttttcacgtcgtgatgctaatcggggtggatgttcacaatcatgtcgctggtactatgatctatatcaaggtaatcaaaaaattaatcaagatggtgtaattccttttagtatgtcaagtaaggatatggcattaattaatcatattcctgaattgattgaactaggagtcgattcttttaaaattgagggtcgaatgaagtcattgcattatattgcaacaattgtttcgacctatcgaaaattaattgatgattattgtaatgatcctgataattttgaattgactgagaaatattatcgtgaaatacaaaaagcggctaatcgttccttatgcactggtttctttgatgatcaggcgggtaacgataagcagttatataatcaacgtgatgaacatcctacacaagaattttgtgcccgagtaatcagctatgatcaagttaatcaaatagctacaatagaacaacgtaactattttaaaattggtgatcaaattgagttttttagcccatatcacgaaaatgttgttgtgccagtaacaaaaattataaatgctgataatgaagaagttgaagtagctaatcatccaatggagattctacaaataccggtcagtgttgaattacaaaaggatgatatgggaaggaaagtgatttgatgaaaaagccagttattattggtattgcgggaggtagtgcttcgggaaaaacctctattgcacaagagctttatgactgttttaaaggacgccatacaattagaattattaaattagatgactattataaagatcaaacacatttatcaatggataaaagagtcttaactaactatgatcaccccttagcttttgatatggatttattgattgaacatcttgatttattaaaagaagggaaaagtattcaaaaaccgacttatgattttgaacagcataatcgtagcaaaatagtagaaatagttgattgtcgtgatgtttttattcttgaagggttatttgtgttaaatgaagtacgaattagagaacgctgtgatattctagtatatgttgatacagatgcagatattcgctttattcgtcggttgagacgcgatcttgaagaacgagggcggagtctagattcggtatgtacacaatatttaacaacagtaagaccaatgcacgaacaatttgttgaaccatcgaaaaaatatgctcatattataattcccgaaggaagcagcaacactgtagcaattgatttattgttaacaaaaatatcttcaatagttgattagtgaagatattaggactagatatttatatagaattatgctatattagagactacgaggtgatattatggaacacgaaaaagtattgttaacccaaagtggggtagaaaaattagaacaagaaagagataacttgattaatgtcgaaagacctaaagttattgaagaattacaattagcacgttctcaaggtgacttatctgaaaatgctgactacgatgctgctagagaaaaacaagcacatttagaatcaagaattaaagaaattgactatatgcttcaaaatgctgaagttatttctgaagaacaaatggatctaaaagtagtaaaacccggtactactgtaacaatcttagatttatcagaaaaagatgctgaacctgaaagttaccaaatcgttggatatactgaaacagaccctttaaatggaaagatttcaaatgaatctccattagcaaaagctgttttaggtcatggagtaaatgaaattgtaacagttggggttgcagatccttatgatgtaaaaattgttaacattgagtttaaaaactagaacttataaaatgaacctactatttagactgcaaaataagtaaggttcttttttataaacaattttaataagtagaaatagaaaaagaatgatttaatcagtattttgtaagaactgtttaaatcattctttaagggaaattatctttggaaagatgaaatattctatggatttgtatataaagttgattaactagatgattggtatatgaggtaattaaagagattgccacctgtataataacattatcattacggattgattatgccaagatattaagcgtctaatttttttgtatataattgtaaaattaaggtagtgataattaaaatgattggtcttgaaaggatattaattagattaatgtcttcaatatttaccattaatgcgataattccaaagatcaatccacatagtaaagcgtgaataattgctttattttgaaatattttgattagccaaaatgcccatacaatcataatgattccagcaattatattaataatactatggtagataaaatttgataaatgaataaaacttataattccggccatgataagactagtaatagtaaaggtgataaggataaataaagcgaattttaggtatatttttaaatatgatttcatatttcctccttgttatcttactaatattatatttaaggattggtgaaatatgaatatcttcgatgtatttttaattagtgtttgcatttatatttatttaagtatcttgttaagaatttttggtaaaaaagaatttagtcaattaaatgtatttgattttgtagtatttttaattattgccgagatcatgacagatacgataggaaacagcgattttactttttatcatggtgtggttgcaactgttacattgattgttgtagatcgacttgtttcaatgataacaatgaaatcaaaaaaacttcgcgatatttttgaaggacgacctacatacattatttttaaaggaaaattggatcaagaaataatgaaaaagcaacgatatactgttgatgatttatcacatcatttacgagttaatgatattgatagtatttctaaagttgaatttgctttattagaaacaaatggttcactttcaattattcctaaagatcagtgtgtagtagaattaccggatgctttaatctgtgatgggataattgatgaagataatttaaaattgctcaaccgggatataaattggttaaaaaaagagttgaaaaaacaaggtgtagataaaatagaagatgttttttattgtgtgccagaaaagggccacttattagtaataaaaaaatagagctggaatcagctctatcctaatagcatgcgatcgttgtcaaattcactaccgcttgcttcttcgaattttttaagtaaatcatcaactgttaatttggctttttcttcaccgttgacatcataaataatacggcccttgtccatcataattaagcgattaccgatattaatagcatctttcatattatgtgttaccattaaagcagttagcttttgttcagtgacgatttcctctgttaaatcaagaacttttttagcggttcgaggatctaatgctgcagtatgctcatcaagtaaaagaattttgggtttttgaagtgttgccatcagtaatgttaaagcttgacgttgtcctcctgataacaaaccaactttacttgacatccttgtttctaaacctaagtctaaacgttttagtgcttcatgatattgttttttttcttctttgctgattccccagcttaaaccacgacgtttaccacgacgaaaagccatagccagattttcttgaatttccatattagctgctgttcccatcataggatcttggaaaacacgtccaataaatttggcacgtttatattcatcggcgagcgagatgtcttgattgtcaatagtaatatatccacagtcaattggataaaccccagcaatcatatttaaagtcgtacttttaccagccccgtttccaccgatgattgtaataaaatctccatcattaatagtaaggttcaaatcttgaagagcctttttttcattaacagtaccaaggttaaaagttttacttacatgttctaatttaagcattctctttctcctttgttaattttttgtatgtagcaatttgttttcttttacttaccataacaggtacagttaatgctatacctactaataaagctgtcaacagttttaaatcatcagtacttagacccaattgtaaaacaactgcaacaataatacgatacaaaattgaaccaacaataatagcagttaaagtaaacatgaaaccaggctttcttcctagtattacttctccaataacgattgaagctaaaccaataacaattgctccaattcccatcttaatgtcggcataaccttgagattgggttactaatgcaccagacattgctattaaaccattagaaatcattaaacctaataatttagttgtatttgtattagcaccaagtgctcgaaccatatgttcattatttcctgtagcacggatagcactaccaatttcggttccaaagaaccagtaacatattaaaataacgattatcgcacaaattattccgatgattaaagtaatccatgcttgtgatagattgaaagtatttgataaacctttgaagatagtatcactttgaagtaaaggtgtattactttttcccatgattcgtaaattaattgaataaaggccgatttgggtcaagatacctgctaaaatcgcaggtatttgacatttagtgtgtaatagaccagtaatagctccggcaacaaatccagcaattatagctaataaaacagcaagaataggatttattccattgacaatagcaacagcacaaacagcaccgccagtggcaaaactaccatcaactgttaaatcggcaaaatctaataatctaaaagtgatgtagacccctaaagccataattccccaaaggattccttgtgatgctgcaccttgaatagctaagataaaactcattacttattcaccatctttgctttagatttaagatcatcaggaattgtaatgtttaattttttagcaactttctcatttattgttaattcacattcttcagcaggtaaatattcaattgccatatcagcaggtttagcttcgccctttaaaatttttacagcctgaagaccagcacgatatcctagattataataatcgataccataagtggctaatcccccattttcaaccatcccactttcaccaacaatacatggtaaattgttttcattagcaacttgagcaacggttgccataccttcggctaagagattgtcagttggaatgtaaatagcatctacttttccaattaatgactcagtaacttgttgtatttgattagaatcagtaacagatttatcaactacagttaaattacgtttagcacattcttctttagcaatgtcagcttggaaaattgagttatcttcggcattacaatacatgatcccgattgttttggcatcaggaagtaattgttgtaacaaatcaaattgatcagcaaccggtgttaaatcacttgtaccagttacatttccgccaggtttttcattggtttttactaatttagcactagcaggatctgttacagctgataaaacaattggaatttctgttgttttgtttgctgctgcttgagcagttggtgtagcaattgcgaaaatcaagtcaacgttatcgttaacaaatttatcagcaatggttgtacaatttgatccatcaccttgagcattttggtcatcaaatgcaacattgtcctcaccatagccattgtcttctaatgctttcaaaaatccttttttagcattatctaatgcgggatgttctgcgtattgaacaatgccaatattaacatccttacttcccccacaggcacttagagttagtgccatcattacagttaaagatgcctttaataattttttcatatttattccctccatattttcaattattaaacaaaaagtcgccctcgatagaggacgacaaagtcgcggtaccaccccaagtttattattaactcacattaataatcttcataagtgtaaaactttactacgataacggctagccaccgatgattacctacttatcagtatccgactccatgatgaattcaatatttcttaacgtattgttcgcaccaaccacaatatctctgatatctaagtcatatttactacttcacttcactgtctttgtttaatagattgttacctaaaataatacgttatgaagttctatttgtcaatataataaaacttgtaaaattaggataaatagctttatttctaaaaaagtattttttgtttaggatttaaacaaattaaattactttaaatagtatttatgataaaagaatgtctaaagacatcataatgacaaaaccaatcatgaaacttattgttcccaaatcaattccttcagttgcattagcttcaggaattaattcttcaatacagacaaaaaacatggcaccggctgcgaaacaaagagcgaatggtaaaactccattgactagagtggcaaaaataaagcctaataatgctgctgggatttcaacaatagcagaaaattgtccatacatcatggcaataaaacggctttttccgcattgatgcataggtaaagaaatagcagtaccttcaggaaaattttggataccaattcctagagctaagattaaagctggtaagtaatttccatcgtgacatcctgcaaatgccacaccaactgctaaaccttcaggaatattgtgtaaggtcatagctaacattaatagcttgttttttgaaaagcgacctggattgattccttcttgttcatgtgacatcatgtgttcatgggggagcagtttatcaatcaacatcaataatgctacaccacaaataaaaccaaatggaatgattagtaaatcaagtttacctccagcttcaagctggtcttttgctggaagtaataatgaaaaaaatgaagcagcaaccataattccagcagaactgccaagagcaatacaaatgagtttttgactggctttgcgaacaaatagaactaacgatgctccaaagaaggtcattaaccagttaaatgttgctacaattaatacaattataaatggatttaacgataataaatattccattttttcacctcaattattactatgcataaaagcctattgcatatgggcatataagttgctgatgaagtaatattatgatatgattattcttaatgaggtggaacaaatggaagaaatgtcaattgcgatgcaaaactatttagaattaatttatgaactttcattagatggaaaaaaagctagagtcagtgatatcgctaagcatttaggtgtatctaaaccaagtgtcaataatgcagttgtggttttggctaaagatggctatgttatatatgaaaagtatgcggatgtaaaactaacgcctaaagggaaagaaacggctgagtttatctgtggtaaacatcaaacaattaaacaattatttgttgaagttttgaacatagacgaaggaattgctgataaagacgcttgtttaattgaacatgtgatttcaaatgagagtattaaagcaatgcaagaatttttagatagacaaaaataatggttattaggaagtttcctaataaccattatttaatatccaaaatccagatattcttcagtagtaataattaaaatagctttatttgtaatttcgtttttcttgttgtcaaatgtttcaattggggtatattcaactttatcacgacgttgaacatcttcatcgtaaacataatcggcttgtctaaagaaaataccatcttcatcataacgcgagatagtcccaagaccacgctgattattataatgaacaactgttccttcaacacgttctacatatttacctaaattattcattactttttcatataattcatcatataattcttctgatgtttgatcgttatatttttcaccataatcagcaactggagtatattcacgattattttcagcagttaattttgttaagaaagcatctacaatttcaattaacatcgggtcttcagtacgttgtgtagcctccatcaagcgtgtataaattcctaaatgattaattgaatatccattttcaaaaaattcatatagtaaataagcatttgcttctttaatgttgcctgtttgagcattagttttataaagaacttcgtagaaattaacattacggattcggttatgtaaagataagaatacttttttagcttcatcgtattgttctagttcgactaatgaacacgctctttgataattaatccattgcaatgtattaaaatgccattttaaagatagagatagtgcattgttagcagtatcaacacattcttttgaacgtttggcctcgtatagagcttttacttttaatcgatagtagcgttcttttttagattcaaattcttttccttcatcattagtaaatggtttatcatctaatagattaggatcaagtaaatcaagcatttcaactaatttgttaggatcttcaggtttttcacgttgtaaatatttaatagcacgatttactgaaggttccattggagaataacgttcctgtttgcatacagctaaaatatcttttaagacactaaagaaaagatcttcattatctctaattttttcatcatcaatattgatgaacttattataaagtgcatacccatattgattcagatatccgcgaagatttggacataatgacataaatgtctttccaacctcaattgcctcttcattgttgtcgcttttcttcaatagtttaatgtaatcattggcctgaaaatcattgaaggaagttgggtcttctttaaacttttcattgtatacttctaaactttttaattcattttcattcataaaatcacctctaatcaatattatagcatctttttaatctcttttgcagtagttaagtaataaattgttttgaaatgcaaatttatatgttataatggctaggataatagatgaggtgaaagaatgaataaacaagtgtttagtatggatttttatggtaaaaatctaagtgtggaagtaggagaattagctaagcaggctaatggagctgtattggtaagatataatgatacagttattttatcaactgttgtggcagggaaagaaccaaaaaatgttgacttttttccattgacagtaacttatgaagaaaaattatattcagttggaaagattccaggtggatttttaaaaagagaagggcgacctagtgaacatgggacattaacagctcgaatgattgaccgtccaattagaccattatttgcagatgggtttagaaatgaagtgcaaagtgttaacaccgttttatctgtagatcaagatgcaactccagaaatggcggctatgttaggtgcatcactggctttatgtgtttctgatataccttttaatggccctattgcaggggtcaacgttggtttggttgatggtgaattcattgttaacggaacaccagaacagctagagaattctttaataaatttagaggtagctggaaccaaagatgctatcaatatggttgaagctgatgctaaagaagttagtgaagaggtaatgttggaagcattattgtttggtcatgaaaaaatcaaagaattaattgctttccaagaaaaagtagttgaggcttgtggaaaagaaaaaattgaaattccattatttgaattaaataatgatttagttgaagaagttgcagtacgtgctaaagccgaaatggctgcagcagtttcaattcccggtaaattagagagatatggagcaattgatgatctaatcgctcaagtgacagaggaatatgacaatagagaatatgaaaatgaagaaataaaagctgatgtgatgaaacaagttggaatcattttacatgatctagaaaaagatgaagtacgtcgattaattactgaagataaaataagaccggatggacgcaaaatcgatgaaatcaggccattagattcgcaaattgatttgttacctcgagttcatgggtcagcgttatttacacgtggtgaaacgcaagttttatcggttgcaacattaggtgcaattggagaacatcaaaaaatagatggattagggttagaagatcaaaaacgttttatgcatcattataatttcccgccatattcagttggagaaacaggacgaatgggtgctccaggtcgtcgtgaaattgggcatggcgctttaggcgaaagagctttagcacaagtgattcctagtgaagaagcttttccttatacaattagagtggtttctgaagtattggaatctaatggttcctcttcacaggcttctatctgtgcttcgacaatggccttaatggcagccggtgttccaattaaggcaccagtagctggagtagctatgggactagtaaaaaaaggggatgcatatactatcttgacagatatccaaggaatggaagatcatttaggagatatggattttaaagttgcaggaactgatgcgggtatttgtgcattacaaatggatattaagattgatggtattacgaaagaaattttacaagaggctttagctcaagctaaagtagctcgtaaacaaattatggcaaatatgatggatgcgattgcagcaccacgtgatgaattatcaccatatgcaccaaaagtacaaatgatgaagattgaaccggatcaaatcaaagcggttattggtcaggggggtaaaacaatcaatgaaatcattgaacaatctgatggtgttaagatcgacattgaacaagatggtacagttgttatttatcattatgatcaagctgcaatcaataaagcagttgagctaattgaaaaaattgttaaaaaagcgcaagttggcgaagtttatgatggtaaagtagtaagagtagaagataattatgcttttattaatttgtttgacggaacagatggttttttgcatatctctgattatgcatatgaaagaactaaaaaaatgggtgaagtgataaaattaggtgatatcattaaagttaaagtcactaaagttgatgataagggaaaagtaaatgtttcacgcaaggctttacttcctaaaccaattaaaaaagaagaacctaaagaagaaccaaaggcagaataatgaaaaggcttgttcttgctagtagttcacctagaagaaaagaattattagaattacataagtttgattttataatcgactttcaagaaattgaggaagtgctagatgaaagtttggcacttcctttacgtttagagaagttagcttatcaaaaagcagcacccattgctttaaaataccctagtgatattgttattggagcagatactatggtatgtttagaaaatcagatgctgggaaaagctgctgatcgtcaggcagcttatgaaatgttaaaattgttatctgatcagacccaaactgtttactcagcggtagcaatcattgataatggaaaagtttctacttaccatgatggaactaaagtcacttttaaaaaattatctgatgaagaaattaacgcttatcttgatttaaacgaatggccaggtaaagcaggagcttatgcaattcaaggtgaaggtaaggcattagtcgctaaagtagaaggaaacttagagactgttattggaatgccagtttggatcattgaagaatatttaaataatcatagataaaaaatattgagtgactagaataaaaaagtatgatttctattatctggaaatcatacttttttgtgatgtcatgtaatcggttagatttattttattttggtaagctgttaggatattgtcgggatctacaatattgggaattttctctgttaaaatatgtccaatcagctgactgtcattattaaatgtttcaggtcccaataaaaaataagtttcaccatcactaaaataaagtgtgatatctacttcatacatatcagtgcttgggcctccagtacctaaactataaagagggataaaacgctgtctagtttgaacgacaagtttttcaatatcttggtagaaataaaacttttgatatttataatgctgattaatcaaggcagaaagtacatatttaaaatggtgaaaagaatttttacgcttgaaaattcttattccttcttctaaaaattcaatagattggtttcttgatttatcgtaaagatgcatcataaattggaagttagcaaaaataaaaattaaaatatttattaaaaagacgactgcgacaaaatataaattttctaaataataccatttttcgctccaaatccaaatataaataccgtaagtaaaaatcgaagcaataattcctgcagaaatgacctgtcgtattgccatggctctagttagtgggcgattataagctattgttttacttgtttttcgatatccaagcccttttttctctggaactaatttaatattttctaatgcaggaattagtggaatatgcatatctttgaatgttgatattgtattttgaagatcttctaattcagaaattgtttgatcaatgttgcgcttatgaatctttaaacagtcatctaaactgcatttattatttaagattgctttgatatcatcaattgaaatatctaaattacgtaaaaatttcacaagttttaacgtttgtaaatcgtcatggctgtagttacggtaaccattatttgttcttttgggtcggatgattcccactttttcataataaagtatggcatgtttagttaaacctgtgattttttcaacttcatttgttctcatggagacccctcctataaagatattataacgtaaagtagatatttttgtttttataataataatttaattattgagtaattatttattgaatctttaaaagtaatgtagtcatctttataataaatagatgttgtttatttaaggcagaagttaatattttttataatattttgttgaattttataaatattgcgtattttatgtaaacggtaacatttttattgagttttattataaaaaatcatataataaagtttatggagggatgtttatggcagacgtaaaaagaatcgcattattatctggaggcggagattgccccgggttaaatgctgttattagagcagtaaccaaagcggctattaatgaatacgggtatgaagttattggctatgtttatggttatcgtggtctttataacaatgattacatagaattgacagttgataaggtagagaatatttataaagaaggtggaactattttatatagttctaataaagataacttattcgactatcttgttgatgatggtcatggcggaaaggtaaaaaaagacgtttctgatgttggtgtcgaaaacttaaaaaaagctggtgtcgatgtgctggttgttttaggtggtgatggtactttaacaagtgctcgtgatttttcaagaaaaggcgttaatgtaattggtatccctaaaacaatggataatgatttgccagcgactgatttaacttatggatttatcagtgcttcttcagtaggaactgaatttattgaccggttaaatacaacggcaaaatcacatcatcgagttatctgttgtgagctgatgggacgagatgctggatggattgcgttatattcaggaatggcaggaaatgcctcatgtatcttaattcctgagattccatttacaattgataacattgttaagcacgttgcaaaacgcgacgctgaaggttatccatacactgtaattgcagtagcagaaggtgctaaatatgctgatgggactaaggtgattggaaaaatcgttgaagatagtcctgatccagttcgttattcaggattagctgcaaaggtagctgatgatcttgaacaggcaattgctaaccatgaagttcgttcagttaatccaggacatatcatccgtggaggagatatccaagcatatgatcgtattttatcaattcgttttggtgtaaaagcacttgaactgattaaagaaggtaagtttggtaatgttgttactttaaaaggtgaagaaatgtcttatacatctttagaggaagtaatcggtgatgctaaatttggaaaacaaaaacatgtagatcctaatggtgaattagtaaaagctgcaaaagcgattggaatttgctttggtgatgaataagactgtaaaacagtcttattttttataaaaatgtaaataatattatatgaataaaaactattaagattattttattacataaaaagaatcaaagatagtcgaaatgaataattattattgcggtagatattagtctagtataagaagtatcatttgataatatttttttaaaaattttgaattaaatattaaaaatagtacataatattattgaggtgaatttatgaaaaaaccaaaacatgggcaacagtcaagtaatgacaatgctaaagatcaattaggtgatgatgaaatagttgtatcaggaaatcaagaagattctacaattaaatatagataagggaaactaactttagtttcctatttttttacataattgaacgattttatccttaactatagtttgctatatttttttcaggaggttaagatatgttaaaaaatgcatttctaagtattaaaaagaatattggcaagacagttttattatttgtaataatgacagtaattgcgaacttgattattgcaggtttgtcaatccagagtgcttcgaaaaaatcaatggagcaaattagaacatcacttggcaatgatgtaacattgacaacaaatatgcaaaatatgatgggtcaacgtgaaaaagggcaagcagttagtgaagtagcagcaagtgttacaattgcgatggctgaccagttaaaagatttaaaatatgtaaaaaattataattatgctatttcaaccacagcaagtagcgatgatattacagctgttgaattgaccacaagtcaagataatcaaacaatggaacgtcctgatggacaagaaaatttccaatcagcaaatcaaggagatttttcaatcagtgcaaatacgacgatggaatatttagatagtttcacagaagaaagtagtactctaaaacagggacgattattatcaagtgatgatgccggaacaaataattgtgtcattgaaacaaatttagctactgataatgatttaaatgtaggtgatacatttacagtttatactactataaatgaagaaacagtaacacaacaattaactattgtcggaatctacgaggtgacagatgctaaaacaatgggtggaccagggcaaagtaatccgtttaatacaatttatacagatttatctattggtcaaacattatcggggagtgaaacaaatattacatcggcaacttattatttagatgaccctgagaatattgaagcttttcaaaccttagcacaaaaaaagagtgatatcgattttgagacatatacgcttgatgcaaatgatcgtttatatcagcaaaatgtaagtagtttagaaaatactcaatcatttgcaacaatgtttttaatcgttgtaattggtgccggaagtgctattctatgcttgattttaattttaacaatcagaagcagatattatgaaattggtgtatttttatcattaggacaaagtaaagtgaaaattattttacaacaattatttgagatgcttttgattgcagctgttgcctttgttatttcactaggtaccggaaagttagtatcaaatgtagttggaaatatgctagaatctggaacgaacaataatcaagttcaaatgcagatgccggaaatcagagatcaaaataacgatagcaataacactaattcgacatccggtaatgataaaatgttcgatcaagcatttaatggaccggaaaatacagaattagatgtgtctttaacaactactacagtaatgcaattagcggggattacaattgcaatttgtcttgtttcaatcgctattccatctgcttatgtattacgattatcaccacgtgagattcttgtgaagaaggaggggtagagatggaaacaattttgaattttgaagatgtttcataccattatttagatggttctagtaatgtaagtattttgaataaagctaattatagttttgaaaaaggaaaaatctatgcaattgttggcgctagcggtagcgggaagacaacaactattgtattggctggtggtttagataagccaaaaggtggaaaagttatttttaaaggccaagatactgcaaggattggattaaataaatatcgtcggaatgacatttcgattgtgtttcaatcatataatttgattcattatatgaatgcttatgaaaatgttgctaatgcaattgaaatagctggacggaaggtccagaataaaaaagaatattgcctggatattttaaaaaaattagggctttcaaaagaacaaagtttacgagatattcgcaaactttctggaggacagcaacaaagaattgctattgctcgtgcaattgccaaagatgttgatttaattttagctgatgaacctacgggtaatcttgatgaaaagaattctaaagaaattttaaaaacatttatcgatttagctcatcaagctaataaatgtattataattgttactcattcgccatcattggctcaaaaatgtgatgttcaattaaaaatagaggacggacaaattgttgaaatttaaaaggctgctcaaacagccttttaatcattgatgggacttttataaggatgacggtgatcaaataatttatcacgattaattttttcattaatataatgatcataattcaatctaaagatacatgaaaaaatcaaatcaagcaaataagaaatcgatgttttggatgaataaggagctatcttagaaaatatcttttctcgtgatcctgtattcataatataagtgcaatattttgataattgattatccccgatagaagtaatacccaaaaggggaacatgcatcttttttaaaaatttcgcaagttctaccatttcattcgtttcgccggaatatgatataagaatggctacatcatcaggactacaagtatatgataagaaaccttgctcaccagcatgagctcgcatttccaccattttaccaattcgcatcattttgtgttgaaaatcaaaaccagctaataaagaattaccatttccaaaaagatagatgcgtcttgcttgatcgagtaaattaataattttgtcaaggttcttaaaatcaactaagtttaaggtgtcttcaatagcttcttgatgcagattggcaatccgatatgcaatttggctatttgagtcggtgtttccaaaaggaaagttgacgtcaacacgttttttgttttttttatcaaactgtaattcagctgaatatttgattttaaagtcaccatagccattaagtcctaatttacggcaaagacgaacaattgttgctggagaagtataagtttgtttagctaattcttttactgataaattaagaatatcttcaccattatctaatatgtatttcgcaattgttttttcagaactggagaaatctaattcaaattctaattgagtcataatactcataaaatcacctctatttagtatatcatgaaacattgtttcataaaactggtatttattaaataaaatatgaaacttgattataaggtcagaaaaactcatttacttatctttacagattaactaaaatggtatatgaaagagaggtattgtaatggaaaagaaattaccagataatttttattggggtggctcagtatcaagttttcaaactgaaggagctcgtaacgaaggtggaaaaggcgtttgtatttatgacgttagaccaactgatccagaattttctgactggtcagtaggaattgatgaatatcatcgttatgatgaagatattgctttaatgaaagatatgggattcaatttttaccgtttttcaatttgctggtcaagaattattcctgatgggactttagatgaaccggtaaatgaagaaggaattaaattttacagtgatctaattgataaattgattgctgctggtatagaacctatgataactttagtgcattttgatatgccttataaattagtaaaagaacataatggttttgcatcacgctatgttgttgactgttttgaaagatatgctcgtgtatgtatcgaacgatttggtaatcgagttaaacactggatgtcttttaatgaacaaaatttacatgggatgatgttgcgtgtatctaacgctgaagaaattcctgaaggtgtggacccagctaaacatttatatcaagtcaatcacaatgtttttattgctcattgtaaagctgtcaaagcattaagagaattacagccagatgctcaattctgcggtatgaatgcagttactaatatttatccatattcaaatacgccaaagaacaatttatttgcatggaaagcttatcaatatatgaatggtttccactgtgatgtttttgctaaaggaaaatatccagattatatgatagcatatttagaaaaccgtggatggatgccaacatttgaagaaggcgatgatgaattattaaagtatactgtagattatattgcttttagttattatcgctctaatactgttactgaaggtgaatttgattatacaagaccatatcatgaagtagttggagaacatacagttaaaaatccacattgcgaagctaatgaatggggttgggaaattgatcctgttggttttagatggactttaaatgatttagcaacacgttctgatttaccggttttcgttcttgaaaacggaattggatggcgtgaagatatgacgcaagaagaagttgatacaatgttagcagctaataaaacaatcgaagatgattatcgtattaattatcatcgtgatcacataaaagaaatgaaaaatgcaatgtttgaagaaggcgttaaatgtctaggttacattacttggggaccaattgatattctagcaagtatgtgtaatatggataaacgatatggttttgtttatgtaaaccgtactaataaggatattcgtgatttaaaacgtattcctaaaaaatcatatcattgggttaaaaaagcatttgaatcaaatggagaagatttagactaagaaggagaaatccttctttttttgctgataaagttaaaatatcctaacttttttcttggcaactattgacttttaagttaggcaggtataacataacagtagttagataggactaacaagaaaaagcgaggaagtgatgatgatgcctttaactatggcgacaattggtgaagtacagaccataaaaaaagtcggaggaaaacaagaagtaaaattatttcttgaatcgctaggctttacaacaggagcgacagttactattgtaagtaagaaccaaggaaatctaattactaaaattaaagaatcaagagtagcgattagtcaagagatggctaataaaattatgatttaactattaaaagggggataattaattgaaaacgctaagagatgtaaaatgcggaactagtgcgagagtcatgaaactgcatggagatggagctgtaaaaagaagaatcatggatatgggaattactaaggggacagaagtactagttcgtaaagttgcaccattaggtgatccaattgaggttaaagtacgaggatatgaactatctttgcgtaaagccgatgcagcaatgattgaagtattatagtagtaaaatatataggagggtgaaaaaatgtcaattacaattgcattagcggggaatcctaatagtgggaaaacaacgctatttaatgctttgactggttccaatcaatttgttggaaactggccaggggtaacagtagagaaaaaagagggtaaattaaaaggtcataaagatgttaaattaatggatctacctggtatttattctttgtcgccatatactttggaagaggtagtggcacgtaactatctaattcaagaaagaccagatgcaattatcaatattgttgatggaacaaacttagaaagaaatctttatttaactacacaaattatggagttggggattcctgttattatggcaatcaatatgatggatatcgttgctaaaaataatgataagattgatgtaaaaaaattatcaaaagaattggggtgccaagttgttgaaatttctgctcttaaaggaaaaggaataaaagaagcggctgatcgtgctgttactttagctaattctaaaagaataaatgcaccaattcataaatttgatagtgctgttgaagaaaaattagaccagattgaagcaatgttgccaagtgatattgcagtggaacaacgacgtttttatgcgattaaattatttgaacgtgatgataaaatttcaggattaatgagtagtgtacctaatgttgaaacaattattgatcaaagtgaaaaagaattagatgacgatgcagaaagtattattactaatgaacgttatcaatttataacttctattatagatgattgttataaaaaacatagtcatgatcaattatcagtttctgataaaattgaccgcattgttacaaaccgctggttagccttaccaatctttgcagtagtaatgtttgtggtttattatatttcagtaactactgttggtacttgggcgactgattgggcaaatgaaggtgtgtttggtgatggatggagtttatttggactagcagttccatcaattccaagcttaattgaaggattattagaatccttaggaactgcggcctggttaaatggcttaattttagatggtatcgtagctggggtaggtgcggtattaggtttcgttccacaaatgttagtgttattctttttcttagcggtgcttgaatcatgtggatacatggctcgggttgcatttattatggatagaatttttagaaaatttggattatcaggtaaatcattcattccaatgttgattggaactggatgtggggtaccaggaattatggcatcacgtactattgaaaatgatcgtgatcgaaaaatgacgattattacaactacgtttattccttgtggtgctaagttaccaattattgcgttaattgcaggtgcattatttggtggtgcatcttgggtagcaccgagtgcatattttattggaatagctgcaattattacttctggaattattttaaagaaaacaagacgttttgctggtgaaccagcaccattcgtaatggagttaccagcgtatcatatgccgacgattactaacgttttaagaagtatgtgggaaagaggatggtctttcattaaaaaagctggaacgattatcttattatcaagtattttagtttggtttacttcatactttggatttgtcgatggacaatttacaatgttagaagatactcagttagatcatagtattttagcatcaattggtaatgcaattgcatggatatttacaccacttggttggggtgattggaaagctgcagtagctgcgattacaggtttagttgctaaagaaaacgttgttggtacattcggtattttatatggatttgcagaggttgctgacgatggagcagaaatctggggaaccttagcagcaagctatacacaaattgcagcattttcattcttaatctttaacttattatgtgcaccatgttttgctgctatgggagcaattaaaagagaaatgaataatggccgctggacagcgtttgcaattgtgtatcaaactgtatttgcttatttagtagcatttagtgtttaccaaattggaaatttagttattactggaacatttacatttgctacagtaattgctatattagtagtgattggttttgtttatctattagttcgaccatataaagaagacaatcgtttaaatatcgatttaaataaaactgtaactgaaaaatagaaagggtgataacagtgaactggctaattgaaaatttatcgactatcatcgttagtgtcattttattatttgcagtcctattagcaatcaattcaatcagaaaagataaagctaatggtaaatctagttgtggcggaaattgtggtagttgtggtactggttgtcatagccgcactaatagtttagtagatagttatcatcatgatcacgggaagtgttagtacttccctttttctttttttgtaaaaagaatacaaatattctttaaaataggtatacttatataataaataatcttaaggaggaatgttatggagaaaaaagcaatttttttagatgttgatggaacattggttgctaatcatggcaaaatgactgagcaggtaaaaaaagcaatcactctagcccgtaatcagggacataaagtatttatttgtacaggaagaaataagataggaattagaaatgagttagaggaagtaaattttgatggttttattgctagtgctggaagctatatcgaagttgctgatgaagtagtccatagccgttattatgatcgtaaattaattgaaaaagcttgcgatgtatttaatcgtaataatatcgtatataattatgagtgtaccgatattacatatatgtcacccaaaatgatggaattttttgtaggtggaaataatgaggaagcgactaattcggagatggaacgcttaaaagctgaacaaagtgataaatttaatgtaagagatatgaatgaatacgatggtcgtggaattcataaaatatcctttattgcaatgaagcaggaagatttcgatcatgcttttaaagaattgaaagagaactttaactttgtagtacatgatatgtttggcagtaaaaatattaatggtgaaataatgtcaaaacttgataataaaggaacaggaatcaaacgaattgttgattatctaaatatagatatggaagacacaattggatttggtgatagtatgaatgattatgaaatgatcgatgcagtcaaatgtggagtggtcatggacaatggcagtgctcggcttaaggaaatagctgatcgaatttgtaaaagtgttgatgaagacggagtctattatgaatttattgatttaggaataatttaagttaaaaagattataaaatataaattgaaatattattctgatattggttgacttcttattgttgctgtgatattatatatgagtaacgagcaatgaatatttaacttacagatgtgaaagttgtatttataagcaacttagcatctgctttttttatagtaatgctttttataataaaaataggaggtacgtctgatgaatacaggtacagtaaaatggtttaatagtgaaaaaggttttggatttattacaaaagatacaggtggagatttatttgttcacttttctgcaatccaaggtagtggattcaaatctttagaagagggtgctaaagtaagcttcgatatcgttgaatctgatcgtggtgaacaagcagcaaacgttgcagctttataattaaccaaaagtctcaatagagactttttatttttgactaatttagcactttcctattgacactgctaaatagttgtattagaatatctttagcacaaatgaatgaggagtgctaatatttagaatggagatgtgagtatggctgagaaaaaacaatttaaagcagaatcaaaaagattattagatttaatgattaattctatttatacacataaagaaattttcttacgtgaattgatttctaatgcaagtgatgcaagtgataaattatattataaagcacttacagaaaatatttcttcaattaatcgcaatgatttaaaaattatgattgaaatcgataaagaaaatcgtgttttaactattaaagataatggaattgggatggataaagatgaattagaaacacatcttggaactattgctaatagtggttcatttgagtttaaaaatgaaaatgaacatgatgatattgatattatcggacaatttggtgttggtttctatgcagctttcatggtggcaaaaaaagtagaagtgatttctaaaaaatatggaactgagcaaggatatacttgggtatctgaagttagtgatggctatgagatttttgaaactaatgttgctgatcatggaactacaattaaattatacttaaaagataatacggatgatgataactatgatgaatatttaaatcaatatcatattcgtgatttagttaaaaaatattctgattacgtgcattatccaattaatatggatatgacagtttcaaagaaaaaagatgatagtgatgaatacgaagatgttattgaaaatcaaacattaaattcaatggtaccattatggaaacgtaataaaaaagatattactgatgaagaatataatgatttctacaaagataaatttaatgattttaatgatccgttgaaagtgattcatagccgagtagaaggtaacgtttcatatgattcattattatttattccttcaaaaccaccaatgaattattattcaaatgaatatgaaaaagggttacaattatattcacgtggtgtcttcatcatggataaagctagtgaattagttcctgaacatttccgctttgttaaaggattggttgattcagaagacttatcattaaatatttcaagagaaatgttacaacacgaccgtcaattaaaagtaattgctgataaaattgaaaagaaaattcaatcagaattagaaacaatgttgaaaaaagatcgtgtaaaatatgaagaattctttaatagttttggtttacaattaaagtttggtatttataatagctatggaatgttaaaagaaaaattacaagatctgctattatattattctagtaaagaagaaaaacttattaccttagcggaatatattgaacatatgcctgaaggtcaaaaggagatttattttgcaagtggtgaaactcgtgaaaagattgccactttaccacaagtagaagtagtcaaagacaaaggatatgatgttctatatttaacagataatgtagatgaattctgtttccaaatgatgcgtgattataaggaaaaaccatttaagagtgtagctcaaggtgatttagatatcgatagtgaagaggaaaagaaagaattagaaaaaactaatgaagagaataaagacttattgacagcaatcaaagattctcttggtgataaagtcgttgacgtaaaagtatcttcacgattaaaatcacatcctgtttgtctagtttctagtgatggagtatcatttgaaatggaaaaagtcttaaatcagatgcctgaaggtcaagaagtaaaagcaggtagaattttagaaattaatcctaatcatgatattttcaatgctatgaaaaaggtttatgaaaataatcctgataaagtaaatgattatgcaagtatcttatatgatcaagctttattgattgaaggattctcaatcgacaatccagttgatttttcaaataaaatttgtgatttgatgattgaattgaataaataattgaagaattttaaagggtagatgttaagtctacctttttttgtactatttagtaaaaaaattactaaatacattaaaaaattgagcgattatgtgtataatagacatatatgaaaatagagtgagagggtatatatgttaaatatttgtgggattattgctttttttatgatgtacatttatgatttgaatttaatttatttaggtaataaaatttttaaaaagttttttgcgattgggtcaataatattagtatttgctactttagcgaatattattatttattttcctaaaaaaatagatgcacactttattatctttttgggacttgcattactggcagcgatagggttaatctatacgttattttttgcgttaaaatttgatgatgcatataaaaatactgagaataaacagccgtgtgtaaaaaccggtgtctatgccttatgtcgtcatccgggggtgcacatgatgattttaatgtatttatgtttatatctagcttttcaaaatgaaactatgttatttatgttgattggatttaatctattaaatattgggtatgtgattttacaagacataattattttccccaagcaatttgttgattacgatgaatataaaaaaatagtaccatttcttgttccaacaattaaaagtattagaagctgtattagaacatttggggaggtgtcaaaatgaaatttgaggataaattaaaagcacggagtcgagaagatgtttggaatgaatactgtggctttttagatttatcgatggatgaatttgttcagattcaaaatcgtctgatggaagaacaaattgccttatggtcacgaagcccattagggaaaaaaatattaaaaggaagtacaccaaaaaatattaaggagtttcgtggactagttccattaacttcttatgatgattatgctagcgacttattacaaaagaaaagcgaacttttaccagatgaaccggttttatggatccagacaacttgggagggtggtaaacatcctatcaaggtggctccttatactgaaagtatgctggatacatttaaacgaaatgtctgtgcctgtttgttattgggaacttcaacaaagcgaggggattttaaagcccgttcgacagatacgattttatatggtctagcaccattaccttatgcaacaggcttgttaccattagcatttgaagaggaaatcggtattgaatttttaccgcctgttaaggatgctgtgaaaatgagtttttcaactcgaaataaagtaggatttaaattaggattgtcaaagggaattgactatttttttggtttaggaagtgtaacttattatgttagtttaagtttaggaaaaatgagttctggtggtggcggtgctatttctttattaaaaaaatctccattacgttttgctaagattgtattagcaaaatgcaaatgcataaaagaaggacgtgagttaaaacctaaagatatttttaaattaaagggatttatggtagcaggaacagataatgcttgttataaggatgatttagaagaattgtggggtattcgtccaatggaaatatttgctggaacggaaccaacttgtataggcactgagacgtggagccgaaatggattatactttttccctgatgcttgtttttatgagtttatcccaagtgacgaaatggagaaaaatctagctgattctagttatcagcctcgaacagtattgataaatgaggttgaagaaggaatgagttatgaattagtaatatctgttttaaaaggcggagcctttatgcgttatcgagtaggtgatatgtatcagtgtattgatcttaaaaataaagatgagaatattaaattaccgcgatttaaatatctcgatcgggttccaaatgtcattgatattggcgggtttacaaggattactgaaaattcgattgatcaagttgtcaaattatcgggacttaaaatcactaattatattgctaaaaaagaatttaatcataataatcgtccatatctgcatctatatgttgaaatggatccacatgctcaaatcacccaagctatttcaattgaaatactaagggaacaattaagcatttattttaaatatgtagatcaagattatcaggatttaaagaaaattctaggtatcgatccgttaaaaataacaattataaaagctggaacatttgcctattatgaaaaaaatcattctcataaaattaaaaaaattaatcctccaactttagaaattaatgaactgttaacgattcaagatcaggattatcgggttgaaatgggaggacgactatatgaataattatacatatgtctcgattattgcgctgtactgttatatatttttatttatttcattatcggcttcaaagaaaactaagttgattaaagcttttatgacattgttaatggcgatgatgttttggactggtggttctttctttatgcgttcaatgtttggaccatcagtcaaattttggtatgatatttctttattgggtttatgtctagtaccatatgcgtttattagttttgtccatgaatttttatttaattcacctcataaaaaagatactatttggttctttctttttgtcggacttttcattattaatgctacaacagaactcttgctgccagcacctgaatatacaataagggctagcgggattccagcattttattatacttctaatgtttatacgtatattttttattgtttctttctagcaagtattatttattgtgtttcgttgatcataaaaggctttaaagaaaatcgtaatcaggtgatccggctaatgccaatgtttgctgggattgcatgtttaatatttggaaatacttgtgttatgttggggtggtttgctggttttccaattgatattgttgctggggttattaatgcaatatgtatgttctatactttgtataaacgacgtttatttaggcttaatcttttagtttcacgacgtagcagttatgtaatagctggaatgttgtcaattattttatttgctaatttagttggtacatttcaaaatattttatttgaacattttggtttgattactaaaaattattatgtattagtaattgcagtagcttttacgattgtaactgcgataatttatacaatgttaaaaaaatttattgatgcaatttttataaaagaagaaattcagcaatcagatagtttaaaagagttttctaactatgtttcaaaaactttgcaagtaaatgaaattgtcggggcaatgggtgaaataattttgaaatgtgtcgaaaccaaacaagtgtatatttgtcttttagatgacaatggtgattattcaattgagtacagcagttcaccgttaagaaaaaataactatattattaatcatgaaaatcctgtggtgattaaattaatgaataacgatgatatgatattttatagtgaatttagacattcaataaattatcgttcaatgtgggacagtgagaaacaattatttgaaaatctaaatattgaaggaattatcccagttaaacaagagcaattaattgggatgatcctgctggctcccaaaccacggcgctcggggtatagttatggagaaattagtttcttgtcttcagttgcttcaattagtgccattgctttaattaattcaaaaatgtatgagacagtttataatgaagcacgtagtgatgaattaactggactgttgaatcgtaaatatttttatgaggctttgaataatgaatatgaaaaattgggagaacgccaattatcattgattttagtaagtgtagatgatgttcggctttataatcaattgtatggtaataaagaaggagatattgtcttaattaatgtagcacgaattatggatgattatgtaaatacacaaggttatacagcacgtttagggggaaaggaatttgggattattttaccaaattatggacctttagaagcaaaagatctggccgaaaacattcgcgagcaaataatgaatatgaataaacgagatagtgactatactttaaaagtagttactgcaagctttggtattagttctattccggtatctgccaatacaattaaacaattattagattatgcagatcaagcgctatatcagtcaaagcgacatggtaaaaatcgtgtatcagtttataatgcaggagtggttgaaagtacaagtggtgtgacgattgttgatgcacatcgagaaaaacagaatatttacttagagtatgcgccgacaatttatgcattgacagctgcaattgatgcaaaagaccattatacttttacccattctgaaaatgttgcttattatgctacaaaattagcaatcggatgtggatatgatagtgaattagtcgagattattaatgaagctgcacttcttcatgatattggtaaaattgggatttcagaaaatattttaaagaaaacttctaaattaagtgatgaagaataccaaattatgcaatcgcatgtggaagcttcagttaatattattcgacatttaccttcattggactacgttattccaattgtcttaacacatcacgaacgttatgatggacgtggatatccaagaagaatttctggtgaagatatcccggccggaggaagaattatggcaatagcggattcttttgatgcaatgacttcaagaaggagttataaagaaccatattcattagagtatgctcttaatgaattaaagcgtaatcggggattgcaatttgatcccgatttagttgataagtttattgaactgataaattctggtataattgaagtaagaggtaatcaaaataatgagtaaggaggaaaaataatgtcattagaccaaattattaagcagcgccgaagtattagaaaatataaaaagaagcctgtttctaacgagcagatacaattgcttattcaagcagcagtcgaagcaccatcttggaaaaatagtcaaacagctcgatatcatgttattacatcacaacctttattgaatgagtttaaagagagatgtttaccggagtttaatcaagaaaattgtaaagatgcaccggttttaatagtaacatctttcattccaaatcgctcaggatttgaacgtgatggaacgcctagtaacgaactggcaaatggctggggctgttatgatcttggacttcacaatcaaaatattcttttaaaagcgacagaattaggattaggatcattggtcatggggattcgcgatattgataaaatcaagggattgttagatatttctaaagaagaaataattgtttcagttattgctataggtattagtgatattgagccagaacggcctaaacgtaaaacggttgaggatattacaagattttattaactattacttttgtaatagtttttttgtgcatttcttttgcataaaattttattttgggctatactatatccgtaccccctaggaggggggaggaggtcttatgaaacgtaaatatagtgtaaaagggatgacttgttcagcttgtgaaaatcatgttcataatagtgtttgtaaattaccgggagttgaacatgttgaggtgaatttattaacaaattcaatgaatgttgaatttgatgaaacaaaagttgatgatagcatgattattaaagccgtaaaagacggtggatatcaggcgagtagttatgatgatgcattagttgataatgacgacttaagtaatttgaaaaggaaattaatttattgtttcatcgcacttggattactgatgtatgtatcaatgtcatcaatgctcagttatccaatccctgatattattagggataatgtttattttaatatcatattacaaataatctttttgattccaattttgattttgaaaaaagattactttgttaatggttttaagaatttgatccattttgatccaactatggattcgttgattgcacttggtgcgggagctgctattgtctatagtatttattcagttgttttagctttaagcggatctttaatggagatgcatttagtccataatgtttattttgaatctgctggtatgattgttacattgattagttttgggaaatatcttgaggctaaatcaaagaagaaaacaactgatgcgattgggaagttattagaattggctcctgatgtcgcttgtcgttttaatgatggcaaagaagaaattgttaaaatttccgaattaaaaattgatgacctggttctagtaagggcaaatgaaacagtgccagtcgatggtaagatagtacaaggatttagttctattgatgaatcaatgattactggtgaaagtcttccgattgaaaaagaagtaagtagtttagtgattgggggaacaaataatctccgaggtacttttatatatactgtaacaagaacggttgaggatagtacattagccaaaattattgaattggttgaagaagcatcaagttccaaagcaccaatgactagaactattgataaggttgttaaatattttgttcctacagtaatcgtaatagccctaatcacttttgtaggatggttgataatgggagaagatttgaattttgctattactagcgcaattgcggtattagttatttcttgtccatgtgctcttggtttggcaactccagtagcaatcatggtgtcaacaggagttggagcaactaatgggatcctaatcaaaagtgcagaagtattagaaaatgaaaataatattgacgtagttgtttttgataaaacagggactctaactaaaggaatggctcaagttagtgatatttatagtcacaaattagaattagcacaagtaattgcgatcattgcatcgctagaaaagggttctagtcatgttttagcgaatgcttttattcaaaaagctgctgagatgaatttagaattaaaagagattactgattttgaatcattaagtggtttgggaattagaggaacaattgataatgttgaatatgcagttggtaatttaaggatgatgaaagagagtggaattgatttaagtcgatatcaagaaaaaattgatttatatttaattcaaggtaaaacattagtatttttagctcatgatcaagagctgatagggttggtgagtatttttgatgatatcaaagatacaagtcgtcaagcaattcagcgtttaaaagaaatgaaaattaaaacagttatgctaactggtgatctaaaaggtactgcaaatgctattaataaacaattaggtttagatgaggtaattgctgaagtcttgccacaagataaagaaaatgtaatccaacaattgcaagcacagggcaatagtgttttaatggtcggtgatggaatcaatgatgctcctgcgctagttcgtagtgatgtgggtgttgctatcggtaaaggaaatgatattgcgatagatgcagccgatgttatcttgatgaaagatgatattcgtgatatagtggcatcgattgaattatcaaaaagaacaattattaatattaaagaaaatttattttgggcatttatttataatgtgatagggattccaattgcagccggtattttctattatagttttggattaagattagatgccatggttggttctttatgcatgtcattatcatcagtttgtgttgttactaatgcgttacgattaaaacgctttaaaccatactatcaaaaggagaataagaagatgaaaaaggaaattgtaattgaaggaatgatgtgtcaacattgtaaaaaacatgttgaagaagctttaaatggcttagcagacacaactgctgcagttgatttagaaaataatcttgctcgtgttgaaacagttcaagatgatagtattttgaaaaatgctattgaaaaagctggttataaagtggtaggaattaaaaatgtctaatgaaaaagtcttattacgtttaaagacagcgcgaggacaaattgatgcagttattaagatgattgaagatgagcgttactgtattgatatttcgaatcagttattagctattcaatcactaattaaaaatgctaataatgaggtattatctaatcatctcaaccattgtgttaaaaatgcgattaatgagcatgatgcagatcagaaaatagacgaagtaatcaaattattaactaaattataaaaaatcagttattgaactgatttagtagttaaatgatgtaattttttgataagtattgttttcaagaagatctactgttgtttgaacgatgattaagcgcttattcttaacaaaagcaatgcaattataaattgaatcatttgaaagcagataaccattggttatttgctttttatttttaaagttaacactgtttaaataatcattcaaagcatttttagcttttttttctgaattatagtaataataattaacaatcaaagcatcattatcattttcttcattataacttattgcctctttgatcattaaactgctgcttttattaaaagtattatattcatcattgttactagatagaccaagtgctgataatgtaatgatcctatcattaagcgggagtgtctcacgcccgataaaatcgattgaaaatccagcaataattaaaacaattgaaacaattaataaccaatttgatataataaatggatatttgctaattttattatttgcttttttattacttaaagttagtttgatcttttcagtagtgagatgatgattgaagaaacggattagtaatgctgggcaaaataataagggaatataatgtaaaattattgacccgttcgtgataaattccattgggttttgattagcaaaaacacttggaatcagtaaaaaagaaagcagcatagcgacaaaaataaaaataatattggagatggtcttattgcgtttaaaataagttagcagcagtgcttgatctgtacccttaatattggctgcttgagcggctttaaaaacatatatctttcgtgatttaccaataaattcataaccgtggtttacataatttaataaccactgatcacgctgttcacgattgtttttagaagattttttttgaggtacaaaaatatctgctttataatagaaacgttgctcatcttttttaaaaactgtaaacatatcaacgcttttgcaattatagcctgactttgataaattatttagcatatcttcaaattgtttatactcactagtatcataattagttaatcttaatttcataatcgactccttataaatatattattagattatcattttttatccaaacaataaagaaaaaccgtgtaaaacacggtttactttgaaaatgctgattctggttcttcgttaagataggctgattcatctaataaatacgattcagaaatattttgacaatgatcgcccattcgttcgagattagcaagaatatcgacgtaagttgaattaactagtgctgaattttcaattttacgaccaactcgtttgatatgacgctgtttagcttttttgttgaagtaatctaaatctgcttctttgtcgtcaacataaacaatatcatccaaatcatgtgtatcaaaggctttaactgcgtgatttaacatatcaatgaccatatccatcatcgcttctagatcttcacgagcttctggtgaaaaatcttctttttcatcatagattgcttcataatatttaacaatgttaatacataaatcaccaattctttcaaaatctttaatagttttcatatttgctaaatagtcattagaatcatggtcatttagagtttcatgcgaaatcaaaactaagtactcagtaattttactgtctagtgtattaatagcattttccatttcataaacaccatctttagctaatgggtttttagtttcaaaataagctctaattccttcaactgcttcaattgtaatatgacccatctcgattatcttgtttttagcaatagctaaagcatgactcgggaataactgaacaacattttgatctaattcgcttaaatccatatttatttcttttttactgctcggtaagatttttttgataagttttacgattgctggtattaaaggaaaaaagaatgccgtagttacaacgttaaagattccatgagctactgataattgtagctcaggtaaaatatttaatgctccagcaagccattctatcaagagcgtgaatggcgataagacgatcataaataatagtgatccaaccacattgaataatacatggaagaaagcagcacgtttagctggtactgttccaccaaatgaagctaatacggcagtaatcgttgtaccgatgttacttccaaaaaggaatggtaaagcgatagataaaccgattgctccagcaccgtacatctgttgagcaattgcaattaccgctgctgaagattgaactgctgttgttaataatgttccacccaataatcctaaccatggattttgtgatagataattcgctacttgtgtaaattctgggacttttgaaatatttgctaaattatctcccattaactctaaaccatagaataaacatccaaatccaaagatgatttgtcccatatattttgtttttttgttttttgaaaacattaaaaaagctgccccaaggataataaagtatactgcatattgagatacttttaaccctacaaatacggacgtaataactgttccgatgttggcacccataattattccaattgattgttcgagggtcatcaaaccagaacgaattaaaccaattgctaatgctgttgttcctgaacttgactgaatcaaacaagttacaaatgcacctattactatacctttgaatggactagaagtatacttatcgatgatatctttcattttatcacctgagtatccttttaaaccatcgcccatgtactcaattccaaataaaaacaatcctaaacctgcaagtatcatcggccaatcaatgtccgctaacgtcataaaatcacactcctatacacaaacataatatagaaatgttaagtaattgtaaattatttgtaaaataaattaacacaatcttaacatttggataaaatacttaaaattattggataaatatgttattatatggtgaaataaagagtatagaaggaggttgaataatgagtgagagatctaaaaaatttttatcgtattaccgtccatatttaaaattatttttagcagatatgttttgtgcaatgattgctgcaggaattacattggtttttccaatgattattcgctacattacaggaacagttttaatagctgataattttgaaatgggcatcatatataaattagggatttttatggtagttttagttattgttgagtatttatgtaactattttgtggcatatcaaggtcatgtgatgggggtttatatggagcgtgatctgcgtaatgaattatttcaacattatcaaaaattatcatttagtttttatgatgaacaaaaaacggggcaattaatgtcacgtttaacaaacgatttgttttcattaactgaactttatcatcatggtcctgaagacattgttatttcatttattaaattttttggtgcatttattattttagcaacaattaatcttaaattaactttaattgtttttgcttttattccagtgatgggtgcatttatttattattacaatcgtaaaatgaaaagagcatttaagcgaaataaacaaagagtaggggatattaatgcacgaattgaagataatttatcgggaattcgtgtggtaaaaagttttgggaatgaaagtcatgaaattattaagtttcatgatgaaaatagtcgttatgtaagcagtaagaaaaatagttatttttatatgggaaaatttcattcaggattaggtgcttttactagtatggtgactgtagcagcggttttctttggggctatttttatttctaatgatggattaaatacagctgatttaattgcattcttgctttatattaataatcttattgatccagttaaaaagtttattaattttactgagcaatttcaagatgggattactgggtttgaaagattcatggaaatattggaaattgaacctgatattaaggataaaaaagatgctcataatttattagatgttaaaggagccattgagtatcggcatgtcgggtttagatacaatcaaaaaagtgattatgtgttaaaagacattgatttaaaagttgctcctggtgagtatattgctttagttggttcttcaggggcaggaaaaacaaccatttgctcattactgccacgtttttatgaagttagtgagggtgatatttttattgacggacaaaatattaaagatattaaattaaattcattacgtcaaaatatcgggattgtccaacaggatgtttatttattcgctggaacaattttagataatattcgttatggtcgctttgacgcaacagatgaagaagtcattgaggctgctaaaaaagcaaatgctcatgattttataatggaattaccagatggctatgatactgattgtggtcagcgtggagtgaaactatctggtgggcaaaaacagcgattaagtatagctcgggtttttttaaagaatcctccaattttaatttttgatgaggcgacaagtgcattggataatgaaagtgaacatattgttcagcaatcattagaatcactggccaaaaatcgaacaacgttagttattgcccatcgtttatcaacgataaaaaatgctaaacgcatttgtgtattatctacaaaaggaattgaagaagaaggaacacatgatgaattattggcaaaaaatggccaatatgcaaccttttataaaatgcagtttaataaatagaagtagaagaactgaaatgaactcagttatttgggtctccaaatgaagaatggtttatttcagaacttctatttttttataacaatttaaagatcagtataaatagttaaaacaagattgtgataatcttttttatatcattattgttgtgttaaaaagctgagaagagtaaactgtatctatacgattaaaggagaaataggatggaattatataaaataattgcccctaataattggaaaagatcaatgtattgtcagtttttttgagatagtagtgaacaatgtttttgtctgaacttagaagtagatactgcgaatttaaaaaagaatttgagagcaaaattattcattcacaatggttttgacctatgcagtaagtaaatatgcaagtgagatagaggcatgcaggtactgattttttgacggtcaaatcgttctatatgatcaaatcgacacagcccttacatatttagagctagagattggattatttgaagtagtcatagttgcaatacagccaaagatagaagactatatccagttggctacaaaaatggcaaaagaacaaactgaatatttactgattcactaggaaataatgtattttaattttcattacagtctaggataccatattaacatatattacacactaactttggtaagaaggataatgagactctcttattcgactagagaaaatatttctaatatgatggtgaaatacttttaccatttttaattcaaacacatcatctacttgttgatgatctacatatgggtaaatgataaaatatagttatcactttttttaaactaaattaagatgggaaaatatgagaggaatagtatgatacagatattaaaagataaacagtcgatgtatacaattaatacatcgttgcatgagctgcctgtagtaatcagcttaccgcatagtggaacatatataacttctgaaatggctgaaaatttaatggacgatgttatttttcctaatactgattggtatttaccaaaactgtatggctttttaaaagaattagggttcacaattattattaataatatgaaccggcatttgattgatgtgaatcgtgatattaacgataaaaaaggtagttcttataagacaaatctaatttatacaaaaaccactcaaggagctttaatgtataatcacgaattatcagtacaagaaattgaaagacggattgctgattattatttaccttatcatgaggcgattagacaagcattgctagagaagcaaaaatattttaaaaaagtttatttaattgatttgcatagctttggattgaattatggcgcggatattattcttggtaatgataatggtcgtgcttgtacttctaaaactacaaatttctttaaaaaaatgatgaagaagcaaaattttaaagtgactgaaaataatccttttgcaggaggctatattactaaatattatggagccagtgttgaaaattgtgaggcaattcaaattgaattgtggtatcaaacatatatagataaacgttcttttggcaatgaggagctgccggtaatcaataacgagttatttggtgagacaagccggaggatggaaaacgtgtttattgaattaaaaaaatggctaaaggatgaataattttaatgaaagaacaagctatagatagtgcattgattttaagaaaaagctttgagcatggtgaagctctttctgaaatagaaatatctgaattattaaaagaatctaaattagttgaaaaattgacaagagattatgaagacagtcccttctttaatatttttagacttatttgtttatcagaaataccatttattgaacaattgccatatactcaaaaaatcattgattttatatctaataatttagctactgatgaaggtttttcatataatagacaaggtgattgcattgttccttgttacaatgcaatgcttttagaagcatatactcgattgcaaatggcaaagagcaatgaagcacagaatgctctagattggataaaaagatatcaagtatttgagagaaatcaaagaacatcttggcgatatggagaaatttgcaaacatggcggatgtatgaaagctacaccatgttatattgggattggtaaaactgtacgagcattgattacttatgctaaatatattaaaaatgctgattctcatgtcgaacaactgattgaacagggaattgtatatatgttaaagcacaatatatatcagcgcttatcaaatcagcaatgcattagtaaatatattgataaaatcatgtttcctcaagcatatatgttatcattgacagatttagtatatattgtaaatgaacgaaatttatggtgggatcaacgtacgattccgttgaagaacctctttgaagagaagcaagtaggttcaggccaatggaaaatagaatatatttatagtcataagggatacaaagcttttgaaactaaaagaaattcctcgaaatggataaattatttatataacttaaataagtaggaagaaaaatgtgtcaagaatgttatgtggatgaaagacgctgtacgtcattattaaattcgctagtttgtttagaaaaacatactcagtatatttgtggaacgtgtggaagaaatatctgtatagaatgtgatttaaacgagggttataaaggtggacttttccatttaaaagccttgaaattgctaagatgtatttatgtacagctgattatagttaaaaaaacatgtgtgatatatcgaattgaaaataataatggagaacttcttataagatttttagtagtactggttatttgaaagagtatctaaagaaaaatagtgataaagtatgaaagaaatggcactaatatttaaaatggataaatatattaagtattcgggaactgaagtgcgtaaattaacttttgcggaaatagaaaaatatcttgatgaaaggcaatagaatgttttgaaagtgtaaattacaaacagtttatgtgaagagcatgcttaaatggagaaattagtgagaaaaataattttatatgttgcaatacgccttgatggttatattgttcgtggagatgtggcgttacatgggcaaggtgttaattcagataatcaaaatagcaatcaagaatttttaaagatatagatacagtaattatgagatggaatacttatcatcaaattgtaacagaattgtcacctaagatgtgggtctatgacaatttgattactcatgtttttacacacaaatattatgaaaatggagctaaaattaaatttactaatgatgatgcttacgattttttaaatcttttaaaatcataagtaggaaaaaatatctggatttatggaggcacaaatctgatttcacaattaattgaaaaagattttatagatcgttatcatatgacgattattcctacaattttaagaaaggaaattcgtctttttgaaactactcatgattatgaaataaaactaaagttgattaaatcactaagttataatggaataagtgattgttttatgaacgaagataacattttattataaaagaatttatatttttgttaaaaatggtagtgatgttattgataatatcgctaccatttttaaattaaaactaattaagttatttaattgaattatttaagagataaattatttattattgatctttccttgataacatgaattaccgacaagatcatcttcaatttttaatagacgattatatttacaaatacgttcactacgagacatcgaaccagtcttgatttgtccaatatttaaaccgactgccaaatcactaataaaagtgtcttcactttcaccagaacggtgtgaaataattggagcaatctggttttttacagccatttcaatacaatcaatagtctcacttaaagtaccgatttgatttaatttaattaagatactattgctatagtttcctgcgattccggcttttaaccgattggtattagtaacaaataaatcatcaccaactaattgaattttagctcctagtctactagtaagttttttccaaccagtataatcttcttgatctaaaccgtcttcaatagagataatagggtatttgcttacaagttgttcgtaatatttaattaattcatcacttgtatattgtttaccattaattgtgtaaataccattctggtatagttcactggcagctacatcgagggcaattgaaatatctttgccaggttcataattacattctttaatagctttaatgattaattctagggcatcatcattggattcgagattaggcgcaaatccaccttcatcacccacagaagttgctagattacttcttttcaaaatatcttttaaagtatggaaaacatttgttgccatttccattgcttgatagaaagaattggcactgattggcataatcatgaattcttgaaaatctagtgagttagtagcatggcttccgccatttacaatattgatcatcggggttggtaagacatgagcattgcaaccgcctaaataacggtataatggaatttcaagatagtttgcagcgcaatttgcaaccgccaaagatactgccagcatggcattagcacctaatttttctttattttctgtattgtcaaagcgaatcattgctaaatcaatttctcgttgttctaatacacttttttctttaattaatttggcaatagtctcattcacattgtttattgctttaaatacactttttccacgataccgtgcatcatcgttatcgcgtaattctaaggcttcatattttcctgttgaggcaccacttggaacaatcgcacttccagaaaatccactttccgtagttacttcaacttgaattgttggaaaacctcttgaatctaatacttgtcttgcatatacatttgaaatatatggcataattttatcactccttcattttttattatgaacggctttaatttgctttaatcaaatatattatcttgtttttaataattattatacggtaataaaggagttttttattaatgattcatgtaattgttaattcaaaggtactttacaagattggatacaagtgctaatatgcaattaattttagagatgttaatcaagtgctagataaaggggagaacacgaatgaaaataaatgaagaaagaaatttaccaattggattcattgattctggtttagggggattaagtgttttaaaagaggcgataaagataatgcctcatgaagattttatatactatggtgattctttaaatgctccttatggaaccaaatcagtagatgagattagagatttaacctttgctatcgttgataaattattaaaattagggatcaaaggactagcagtagcgtgtaatactgcaacaagtgcagctgttcgacagcttagaataatgtatcctgatttaacaatagttggaattgaaccagcaattaaaccagcagttgaatcaaaccatggtggtgaaatcttagtaatggcaacacctatgacaataaaacaagaaaagtttaaccggctgctagatatctataaagaccgtgccaaaataataccagtatcatgtaaggggttaatggaatttgtagaacatggaaatttgaatgggagctttttagaagcatattttaatgaaacacttgtcccttatttaaatgatactactgaaacaattgttttaggatgtacgcattacccctttttaagaccgtatttaaaagaatttttaggagagcgaagaatacagattattgatggcagtcatggaacttcatgtgaattaaagcggcagttagcaggaaaaaaattattgcagaaagaaaatcatgaagggaaagtagtaataaaaaattcgatggatgaaccagagatgattgatttgagctggaaattattgaatttgccaatcgattaagttacatacaaattttaaaaatggccgaattggccttttttagtgtgatacaaaaaatgttaaattatggttaaattttcgtataagagtgcaatagagtatacttataaataaaggttagttttaaaatatttagcgagtaaaagaacatgattaaattttgaatgttctttttatactgttggaaaatataatataactgcttataaagtgtaaaaagataattctttgggaggattcctttatgcgtagaaaattatttttaattgttctaactacgtcactattgttatctagtattatttcgatttatgtaattcataatcttcaaggaaatgccagagttatcaattatactggtgttgttcgtggtgcaacgcaacgattgatcaaacaagaattaagtaataagccaaatgacaaattagtgaaaaaaaatagatgatattattgatgaactacaaactggacatggtgaacttggtttgattcgtttagcttctgatgatttccaagaaaatatgactcaaatgaaatttgattgggaggggttaaaaaaagaaatttatttggttcgagaaggcagagataatgggaatttatatttttatagtgaagccttttttgagttggcagatgatacggtacattctgcggaattgtattctgaaaagagcgtgtattcagcagaaggaacattaataattttgaatctagcgttagcaatactagtgttttttatttataagtataatactaaacaagaaaaaatacgaaaaaaattagagaaagaggaagaaaataataaacaacgtaaagtataacttgcaagactggctgaaaacatacgcgctcccttaaatgatatttctgaacttttatatattgttgacttagaaacttatgatttattatttattaatgaaaccggaatgaaaatatttgaggttgattcaatctatggaaaaaatgttataaagtcttacaaggaagagatgcgccttgtaattttgtactaactgctatttgaaagaagaggaaaattatacttgagaatttactaatccgctaactaaacggcattacctgttaaaagatcgtttaattgagtgggatggtaaggttgcaagaatggaaattgcttttgatactacagaatctgagatagaaaaacagcagttaaaatttacacttgaggctgaaaaaacgattacagaatgtattggtatattatatcgtgaaaatggcgttagtactgcaattattgaagtgttgagaaagcttgggaattttttatcagcagaaagaacatacataatctatattaaagatgaactaatgtataatgactatgaatggtgtgcggaaaatattatatcacaaaaaaccaccctacaaggaattcctcttgcaatgattgatcggtggattccttattttaaaaatgataaatgtgtaatcattgaaaatttagaagaaataaaagaaatttcattggaagaatatgaaatactagacagtcagtcaataactagcttagtgtagctccgttggaacaaaatggcgaactggcaggttatttaggagttgataatccacctccagataaaattattaatattgcttcattgcttcaaacattatgttatttcgtttcattagcattacaacatgcagagagtcaaaaaaaattatcatatttgagttatcatgataattcaacgaccttttataatcgtaatcgttatattaaagatactcaaaaactttttaatatggatacttcattgggaattatttatttagatgtaaatggtttaaaagatgtaaatgctcaatttggacacgaagttggtgacgcattattggttgaatgtgctagacgtatgaaaatggtatttaaaaaagctgatttttatcgtattggtggggatgaatttattattatttgtcaaagcataaaaaaagagtcatttgaaaaacgagttaaagaattaagtgaaagtttttctaaaaaaccagtttgtcaagtagcgataggaacacaatggactaatgcagtaggtaatattaatgagatgattgctgaggcagatgcaaggatgtatgaaaataaaaaagaattttatcataagcatatgatttccagacggtatcgtcaccatagcgatgagatgctgcatctcactaatattgattatctagaatctgagattgaaaacggtcattttgttgtctatctacaacctaaaattttatgtgaagatcgctcagtgttggggcagaaacattgatacgttactgtgataatgctgggacattaattccgccacttttctttttaccattattagaaggggtagaattagttgatcttattgattttttcgttcttgatacagtttgtcaaaaaataaaatattggttagataaagaaatgaagataattccgctttcaataaatttttctatagaatcacttcgtggtaaatcttttgttgaacgtattttagaaacttgtaaaaaatatcaaatacctactaaatatatagaaatagaaataacagaacgagtacatgacgaaaagaattttgaaattaaaacggtaatatcaaaacttcgtagtgctggatttattgtagctattgatgattttggaacggagtatgccaatttagcattattatcggatgctgagtttgatattctaaaattggataagagcttaattagtaatgttgcattaaatccaagaactaagataatcatggaatatatttcaaaaatttgtcatcgattaggggtggatatgatagcggaaggaattgaatcagaagagcagttttttacgctgtgttcatatggggttgaaacagttcaaggttatttattcagcaagccgttggcaataaatgtttttgaagaaaagtatctaagttaattttaagaagctaattaaagtttatttaaggtgttgtatgtgcagtgtataaataataacatttatttgactttattttttagttgtcattgacattgtctatataattatctagaatataagtatatagacgtggtattacctttaaatcaattatagcctaagtattagtatgagcaatttttttgcttgctttacttaggttttattcttttaaaagtaatgaatgtttactgattcaatcaagtatgacaaaatagatggacaaggagtgtgaaaaattaagggaaaacaaatattgttagtacttggtaataatccgcaagtatcaaatacttgttgcaatttatttaggcctttgatttattttagactagagaagggtaaaggagcaaaaaaatgaaaaggttagggaaaaggagaatcatttcgctaattatggctttatcaatggctgttacaactgtatttagtgcaaacatttctaatgttagagcgctaaccaatgcagaaaaagcaagggaacttgtcagtaaaatgacattagaagagaaaatcgggcaaaagttaatgttatctttccgtagtggatggacaatgagagatggaactaaaatttcatcggttcaaactattaacgatgaaattcatgagattattggtgaatatgatatagggagtgttatcttatttgctgctaactttaattccgatgcaaaagtaaatgtagaattgacagatggtttacaaaaagcagcaatggacaaagatttaggtaaaaacagtattcctctattaattgctactgatcaagagggaggaatcgtatatcgtttaactggtgggacggccttaccaggaaatatggctttaggtgctagcggtaatactgaaaatgctgttaaagcaggtaatattattggtagtgaattaaatgcggttggtgtaaatgttaattttgcgccagatgctgacgtaaataataaccctaataaccccgttattggattacgttcattcagtagtaatccgcaattagcagctaaatttgtttctgcttatattgaaggagttcaaagcaataatgtggcaactgccgctaaacattttccagggcatggaaatgtagctacagattcgcatacaggtttaccttcggttcctgcgactaaagaagaattatataaaacagagttagtaccttttcaggcggcaattgatgctggaacagatatggttatgactgctcatatccaatttccgaatattgtaacagaagaaatttactcagataaaaaagatgagctgatgagtccgccagctacattatctagggaaattttaactgatttattaagagatgaaatgaagtttgacggtgtcattgtaactgattctatgacaatgcaaggtgtggctaattactttgatacaaacgaaagaaacttattagctgttaaagctggagttgatattctagatattccatttacggatatttcttctatgaaagatatggaatctaaattaattccactgattaatgcatttgtcgatgcttatactaaagaagatggttataatggaattaaattatcattagaagaattggataaatctgtggaaagaattttagtttgtaaatacaacagagatgtcatggatttagcaaatgatacaactacattagatgataaaaaagcaatcgcttcgaaagtggttggttctgttgaaaatcgtgaaacagagagattaatttctgcaaatgcagttactgttgttaaaaatgaaaataatgtattaccacttaaattgactaaagattcaaaagtagtatttgcatcaacttattcaaggaataataatcgttttattttggcttggcaaagagctaaacaggcgggaattattccagagggggcagattataagattttgcagcactataattggacaggattaaacgataaggtaaacagtgctataaattctgacggaactaattttgttgggacaaataaagatgtgctagattggggtactgttcttgtccatgcctcagaaatcagtagtgctagtggaatagatggatatttggtagcttgcccacaattatttactaagtattgtaaagaaaatggaaagcagacggttgttatttcattaaatcatccttatgatgttcaagccttcccagatgctgatggtattttagcagtgtatggaactactagtcttgggctggatattacggaatcattcggtggtggtacagttggagcaacagcagcatttagtcctaacttgacagcaggtactgaagtagctttaggtacatttggagcttctgggaaactaccggtagatatcccaaaatatgttccaaaatctggagtatattcaactgacgaaaatgtctatgaattaggatatggtatagaatatgatgcaattgctaaagatccagataaaaaaggactagcagatgcgattgcacaagctaaagctatagataaaagtgtatatactactgagtcttgggaggcagctgcagaagctttaaatactttaaaagtcgtattgcaaacggctgaaaatgttaatttgactcataaattggcacagtctgttgttgatgaaaatgaaacagatttacgtgataaatataatacggttttatcattattagtatataaatctgacaaaaaagctttatcagatttgattgccgaagcgaagaaattagataaagatcattatactattgaaacttggcaaaattttgaaaaagcattagaaaatgctgaatctatatatgatggaaatgtaccacaagatgaagttgatttagctaaagaagcattagaaaaagcaaaaaatgagttacttgagaaaaataaaaaagaattatcagctgctcttgaaatggctaaacaagtaacaccagaacagttagataaggttgtaccagctgtggtgactgaatttaaggctgcattggaaaatgctcaaataatttttgataaaaaggatgcaaatgaacttgaaataaataaagcttttgaacgcttatctaatgtaatgcaaatgttggaattctataagggcgataaaacacaattaagtgcattagtagaaaaaattgaaaaattaaacaaaaatgattatttaagcgcaacatggaaaaatttagaatccgtcttaacaacggcaaaagatgttttgaacaatcctgatgctttagaaatagaagtaagtgaaacgcatgatcaattagtaagaacctttttacaattaagattaaagccaaataaagatttgttaagtgagttgatcaataaagctgaaaatacagatcaaacaaaatatacagcagtatcattattatcgcttaagagcgcattagtagaagcaaaagcagttcttgataataacgaagcaacccaagatgaagtaactgctgtagaaatattattgaaaacagcattagacaatttggtagtgaaagaaattactctagatgatccaaatgctcaaacaccaccagatgctaaaccaggtaatggtgctataactgcgacaaaaacaggtgatgattctatgatgttaacatttgccttagcgggattattggctttagctggcagtgtgattgtattgaagaaaaaagaagaataatttatacttaagctaaaaagtcactgtatatagtggcttttttgttttggtttgttttgagaaacaggatgatttatttaataagaaatatgttataatattcctaatattattttatagtacattggtttaaacaatatttatttaaaatactaaataaacttcacatttattagttagaaaggggaatttttaatgaagcagcaaaaatggaatattcatacgcatacaacaagatgtgggcatgcaactggactagatattcaatacattcaaagtgcaattgaggctggatttacaatgttaggatttagcgaacatctgccttatcctgaaatacggatttctggggcacgaatgttttatgagcaaaaagatgaatatattgcaacgataagaaaattaaaacaagattatcaagataagattgatattaaagttggctatgaggttgagtatttaaaagatcattttaatgatttgatgaatttgaaaaaagaatgtgattatatgattttgggacaacattttaaatatttaatttatgactatgacagttattgttctgatgaggatgtatatgtttatgcacagcaaatagaggaggcattatctaaaaattttattacatatgtagctcatcctgactattttatgatggggagaaggagtttttcaaatgcttgtgttgatgcggcgcatcgaatagcaaaagctagcatccgttatgatacaccgttagaaattaatctaaatggttttggatatggaaaaaaacaatattatataaacaatgaattaaaggcatgttatccatatccgtttcgtgaattttgggagataattgctatgtatggttgtaaagtaacttttggatatgatgctcattcaccacttacgttattagagcgtgagcgggaatgttgggctctagatattttaagtgatctaccacttaattttattgaccatatcgaattaaaatgagctttatagataaaatattatgcttaaaaattattattaactatattttttgattcaaataagattagtaatttaagaaaaaggagattagaaatgttgtactcaaagaagataaatatggcagatattagagcaagaatatgagtatgtttctaatgttctagaagacaaaaatgattttgaaaataaaattttgccaggttatattaattcttccaacgggattggacttcttgagggatgggttccggaaacagaagtgtttttatggaagatgatcaaattattgactgatttaggattggacattacttgactgaaaagttggctcatggtgccggacatatcggatatgtaataaaaaagaatatagaggaaacgggcatactgtgaaggattaaaggtaactcttcaaatagctaaaaatattattaaagaggataaaatatatctgtcagtccataaaaataatctagcttcattaaaaatccaataaaaaaatggtgcatatattcatcatgaagacgataagaaattttatacacgaataaaaaatcagtttaaagctactctataattaattaaatactagtaaagccggctaaaaacaatgtacaataaataatgggttatttttaaatactaataaataacttgaattaaaaaaataactatattttaatttggaaaggaaggtatgcatgcctgttaattgctagtttagcaaagctaggcaattgagattattagttgcgtactaaagggagtggaattatatatgagaaaatatttcttttttgacattgacggaacattaactaatagtaatcctgggggaattattttaccctcaacttttgaaacattagataagttaagaaaaaatggtcattttgttgcaattgcgacaggaagagcgcactggatggcaatggattttagtcatgaatcaaaaattgataatctagtttgtgatgggggaaatggtttagtcataaatggagaattactaggaattgaaccattagataaaaatatttgtttagaaataattgatgagtgcatagaaaagaaatttcctttcggtgtatctttaggggatgttcctgaactatatacatgtaatgagtggctaagtaattttaaaatgcatacaaaaattattgtagacccacagattgattttcatcgggttgataatatttataagatttttattatggctacacacaagcaggaagctgagttgactgcaatccataaacttggttatatgcgatatcatggtgatcaattaattgttgagccgttggaaaaatatcgtggaattttgaaaatgattgaaatacaaggaggaaaacctgaagatatagttgtttttggtgatggacataatgatatttcaatgatgcgacaagcacctatttcaattgcaatgggaaatgcaattgatgaggtaaaagaagtagctacatatataactaaatctaatcaagaagatgggattgaatatgcttgtaaacattttggatggatagattagctaaatgtggtatactactagtaggtgatgaaaaatggaactaataaaatggattttaatgatagcaggtattttggcttttttaattattggctgtatgatattgctacgtagtgatgaaaaaaagcggagtcgaactaaacagtaccaagaaaatattgatatgctcaacgaaactaatgaaatgttagatactacattaatggaattagaatcttataatgaaccgctaaagaagatatgtgaacatattgataactttaatcataaatttcttggtcaaaaataaccgaaaacagttgacataagattattttttcatataatacaggtatatataaaaactcgttgataaagagagtaatttaattaagtttcttagcgaactggcgttggtgaaaggtcagtaaacaagattaaatgaaccgcactttgaagaggactgtttgaactaatagtagggcagtcagtatgtctactttacagacaagaggggatataagactttttatatcaacaagagtggtaccgcggaaatttcgtctcttagcttttaattagctaagagacttttattttacgcaaggataggaaaggaaaggtaagaaaaatgaagaaattattaaaagtattattagtatgtacgatggcatttacacttgctgcctgcggcggaaacagcggtagtgatggtacgaaagaaattttgattgggatttctccagattatccaccatatgagtctttagagggcaaagatatggttggatttgatattgatatgactaaagagttgtttaaaattatgaatgataacggtggtaattatgaatataaatttaaacaaatgtcatttgatacaatttctacaagtctgatttctgatcaaattgatttaggaatttctggatttacaatgcataaagactgggatgtattatggtcagacaaatacaatgattctagacaagttgctttagttgctaatgatagtacaattactactaaagctgatttagagggtaaaaatattggagctcaattggctgctactggtgaaagtgtagctaatgatattaaagatgctaaagttaaagcagtaaaagatgttaaagttttaattgaaactttaaattctggtgggattgatgcaatcatcttagatgaagcagttgctaaaaactatgtagaacaaggcggatataagatgttagatgaaactttattagaagaagaaaatttaatcatcgctaataaaggaagtgaagatttaattaaagacatcaacaaagcacttgctgaattcattaaatcagataaatatcaagaattaaaaactaagtggggagcataaacgtggatgcattagttgctttttgcacagcagacaatttgatttttttactacaaggggctggtaaatctttattactagccgcttgtgctttgttttttggccttattcttggggttttaggtgctgctgcaaaaatttcaaaacataaaatactaagacttattggaaatgtttacgttgaattgatccgtggaacgcccatgttgctacaaatactttttctctatattgcttttccgttattaatgcgttcgattactggggaaagatttattcctgatccatatgtttgtggtgctattgcgatgagtattaatagtggtgcatattcgacagaattgatccgtagtggaattatgggagttgataaaggtcaatgggaagcttgtgaagtattaggactaaattatacacaaacaatgaaattaatcattttgcctcaggcgtttaaaagaatcattcctccaatcgttagtgagttcattactttaattaaagattcatcactaatttcggttctaggagcaactgaattattatattcagcacaaattttgggggcgaatacatttaatttgattccgccattattggcctctgctgtattatatttaattatgaccttaacaacatcttattttgcgagaaagatagaaaggcggttatctgtaagtgattaaagttgagcatattactaaaaaatttaacgatttaaaagcagtgaatgatgtctctttagaaataagaaaaggagaaatcgtttgtttgatcggacctagtggaagtgggaaaagtacagtgttacgttgtattaatggattagaaattcctgaagaaggaactgttttcataaatgagcagccattgaatgctaaaaaccctcaagcatttaaagaacttcgtagcaaaatgggatttgtttttcagcattttaatctttttccacataaaacagttttagaaaatctaacattagctccaattcaggttttgggaatggaacaagaggcagcgaatcaaaaagcattagagctgttaaaacgagttggattgagtgataaaaaagatgtttatccaaataaattatcgggtgggcaaaaacagcgtgttgctattgctagagcactatgtttaggaccggaagtgatgttgtttgatgagccgactagtgcgttagatcctgaaatggttatcgaagtattggaagtaatgcaggaattagcaaaagaaggaatgacaatggtggtagtaactcatgaaatggggtttgcaagaacagttggagatcgtgtgattttcttagaaaatggaaaaattattgaagaagcaaagtcggaggatttctttacacatccaaaatcagagcgtgcaaaagatttcttaagtaaggtgatgcattaatgaaaattgatttatttgatgttgaagcttggatgactgaatatgaaaccaactatcgatataatttggcggaaacttgtgtagcttcaatgagtattaatgatttattagaatttgttgaaaataaaaaaggagtcattgataatttattaaatactaaattggactatggacctattgttggtagtcaaagattgcgggaagggattgcaagattataccaaaatggtgatgccgataacattacgattagtcatggctgtatcaatgctaatgagatggttttaatttctttgctcgaagctggtgatcatttaattacgattacaccgacataccaacaattttattcttttccagaatcattaggtgttgaaactacgcttattccgttgttggaggaaaatgattggttacctcggttaagtgatttcgaaaatgcaattaaggataatacaaaaatgatttgtctcgttaatcctaataatccaacaagtacaaaattttctagagagtttctagaaaatttgactgatttagcaaaagaataccacttatatattctttgtgatgaggtgtatcaaggattaggtgatggtgaagtcgcaatcagtgatttatatgataaagggatatctacagcctctttatctaaagttacatcatttgctggtttacggttaggctgggtaaaagctaattatgaagtaattaaactgataaatgatcgtcgtgattatcatattatttcaacaggttatcttaacgattatcttggaactttagttattgaaaattatcacaagatacttgaacgaagtagaaaaattattaatactaatcgacagattctcattgattggttagctcaagagccattggttgattgcgttgttcctgaagctggaacaatagcctttttaaaatatcatctttcgataaagtctagggaactttgtgctaaattacaacaggatacaggagtgttttttgttccaggggcatgttttgatcaagaatatcatttacgttttggctttgctaataacagtgacgaaataaaaacaggattacaattattttcaaaatggcttaaagaaaatgcttaattttattctttaagcttttttattatcgataaatagatatttataacaagcgaccatattaataaatagtgcaacgacaatgccgattaacatactgacagctatactgaaaacccctagtgactgactaagaaaatatattaaaactatttctaaagtacattgaatgatgctgattgcaaacattaaacgatttttattcaaagcttgaagcaatgcactaagaggggtttctaaataaaagatagtgaatggaatgcacatatattttaaataagtagctccgcttgttgtatcataaaggatttttaaacaaacttctggatataaataaaaaatcaatgtaaacggtagactaattaaaaaactaccaatcatagcaattagaatatgatatctagcagcgctgattttatgataaactacatcattagtgatgatcgggagaatcaggcgataaattacgccattaaaaaaagtgggtgtaactaataatgatatgacataaccgcttataattgcatattgttgatggatcatactttcttttaaaccgaatttggttaaaacatagacgaggatgattggctctagaaagctaactaaacattgatataaacgtgaaccggttaatggcatagcgatatttaacatatctttaatttgcaaattattgacaatactctgcttattaaaggttgtaatatgatggtccttgagacgggttgtcaaatagaggatggatgctaattcaccaacagacattgccagtgttgcaaaactaactagataggtatctgttaagaaagaaaattgtctaatcattaaataactaaaacttaatcgagcaacttcttcgacaaagccagctttagcaactaaaaagacattttgtttcgctaaaaaataatttttaattattccactaatccctacgagcggaataaacaatgccagtgacaacaaaggatagaaagcaccctcattttttaaaaggttatgactaataaatttcgatgaaaaaagtaaggcactcatgacaattatacaagtaaaaagacaaatcgttaaaccggagatgacaatttttttattattatatttagggtttgctacaagtcgaaagactgctgaaggaattcctaattgacctaaggtaatgcataatgaaaccgttggcattactaagatatatagtgccatcgcttcttgtcctaattgtcgcgctaaaatcatgcgattaagaatactaaacaattttgtgattgctgaactagcggaaagaatgataaaagaatttattagttttcttttcataaagcacttcctttctggtgaaatttgtcatataatatgtaagtgacttttgaatggagggctgaaaatggaatcgattaatgattttaaatttaataaacgtgacctaaattttttaataaaactaaaagcccgtgattttaaacagcagaatattcataatatttctgaacaacaaattaaagactacttatttgagcgcaaatggaaacaaagagatgccgttcccatgtgtgaaataattgatgatatcatgaatttagatttttctgaaatttttgattatctgagtttacaagtagttaaagaagcatctcgtttgagtataaatgatttttcggactttatttcaaaatagttgctaaggcaactatttttctttgaaaggagattatatggattggcggattattaatgatttagactacaaccactatatgcaagaatacaagattaatgcacttttagctaaggtttttgcgtataaacaatattcatctcaagaaattgaaacaatgttatcaagtcgtttagtatatcatgatttttctttattttctgaagcagaaatgacattagaaagaattcatgaggcaattggtaataaagaaaaaatctgtatttacggtgattatgattgtgatgggattttagcaacatcaattttagttgaagcttttagacaattaggagtggaagtgggataccatattccgagtcgtttagaagatggatatggattaaatgcaaatcgtgttgaacaaatggcaaataaagggtatacattaattattacggttgataatggaattaaggcatatgaggcaatcgaaaaagctaatgaattgggagtggacgttattgttactgaccaccataattatgatgatgaattaccagatgctttttctattattcatacaaaaatctcacccgattatccttataaagaaatctcgggtggttttgtagcttataaattagcaagtgcattattaaaaaagcatgataaatacttattttcattggcagctattacaacaatttctgatatgatgccattacttgatgaaaatcgagcattggtaaaaagagcattggaatttatgaaagaaaataaatatcctcaattagaattgttattggggagtaatcagacctatagtgttactagtattgggtttatcatcgccccgaagattaattcatttggtcgcttaagtgaaattattaatcctaatcatctcgttaaatattttagaagtgatgcttcaattggaatattaaaagcagttagtgaaaaagcaattgaagtaaatgctaaaagacaagaattaacaaataaacaatatcaaagcgttttaacaatgattgacccgaatgagcaatttttatatgcttatcaaaatgaaatacacgaaggaatcattggtttagtggcaggaaaatatactcgacaatataaccgacctagctttgtgatgacatttgatagtgaaaaaaatctttataaaggcagtgctcgtggaattgaagggataccgttgaataaaatttttgaaaatgttcaagatttgttagaaagttatggtggtcatgctttagcaggtggatttagtgtaggtagtgataaagttgaggagctaaaagaaaaattagaattgtatttaaataaacaattaaaagattatactcctcctttagtggatgtaattgaagttacaggaaatgagattagtaaagttagtgtaaaacaattagagttattagagccactaggcaatggcaatgaagaaatgcgttttttcataaaagatttaccagtaagtaaagttacgtcgttatcgaatggtaaacatattcgttttgatttgtcattaccgcaagtcaaagcacaagcgttattttttaatcatggagatctttttgaacaattaaaagatactaaaatgatcaatgcagttggtaagtttaatattaatgtttttaataatattgaatctgtcaacttaattattgaagatattaaatagtttaaattaaagtataaaaatgttataattaaatatcataggatattatgtggaggaaatagaatggatttaactaagtatgttgcaagtattgaaaactttcctgaagatggtattattttcagagatgtaacaccgttgatggctgataaggaagcttttaaagaaacgattgaccgatttgttgagtggactaaaaatctggatactaatgttgatattgttgctggaccagaagctcgaggttttttatttggatgtcccgttgcatataatttaaatgcagggtttgttccggttagaaaaccgggtaaattacctcgtgaaacagtaagtgaaacttatgctttagaatatggaactaatgaagtgcacatgcatgctgacagtattaaaccagggcaaaatgttattattgtagacgacttattagcaactggtggaacagttgaagcaactgtaaaattagttgaaaaattaggtggaaaggtagtaggaattgcttttctaatcgaacttgaaggattaaaaggacgtgataaacttcaagggtataatatctattcaatattgaaatactaaaaagagattaaatctcttttttaataataagagggggtgacattatggctgaatataaaggtgctggcgatacagttacaattaatgatgttcttgaagtgtgtggtaaatatattacaaatcaagaaagtattgatttaattaatcaggcatacgattttattatggagaagcatgaggggcaaaaacgcaaaagcggtgaaccgtatacgattcacctgatttgggtagcatatattttggcaacgttacaaacgggacccgctactattgcggcaggacttttgcatgatgtcatggaagattgtggagtatctcgggaagaaatggtagaacgttttggtgaggaaatcactacgttagttgaaggggttaccaagattggtaaaatgccatttaaagatgaatctgatgtttatgctgaaaatcatcgtaaaatttatattgctatggcaaaggatattcgcgttattttgattaaatttgcagatcgacttcataatatgcgaacattacaatttatgccacctcataaacaaaaaagaatttctcgagaaacgttagaagtttatacaccaattgctcatcgtttaggaatcaatgatatcaaaacagagttagaggatttaagcctatcttatcttgatcctgttgcatatagcgagatatcaaaattattagcgactaaacaagaagaacggaaagaatcagttgcaaaaatgatggcatcggttaaacaaatattggatgataatagctatcagtatcgtatcttgggacgggctaaatcaatctatagtatttataaaaaaatgtttgtaaaaaagaaacgttttgatgaactttatgatttatatgcattaaggatcatcactcaagataagatggattgttatggaattttaggcttgattcatgatcaatatcgcccgattccaggacggtttaaagattatattgctatgccaaaaccaaatatgtatcaatctttgcatacttcagtaattggtgaggatggaaatacctttgagattcagattagaactgaagaaatggatgagctagctgaattaggagttgctgctcattggcgctataaggaaaataaaggctattcatcgaagaaagaacaacaagaaattggtgaaaaattgcagtggcttagagaatttatttctctaagtgacgatattaaagacggtgatgctaaagagtattatgattcattaaagcgtgatatctttgaggccaatgtttatgttttaacaccgcaaggaaagatcgtagagttaccgaatggttctacaccaattgattttgcttaccgaattcatacggaagttggacataaagcagttggagctatcgttaataatgttatggtgcctattgatactaaattaaatactggtgatgtagtcgaaattaaaactaataagcagtcattaggacctagtgaagattggctaaaatttgttcgaactgcaggtgcgcgtaataaaattagacaatttattgctaatcgtgaggcagaaactaaaaaagagacaattgaagatgggcgtaaaatgcttcgtgatgaattgaaaaaacgccaattagatgaaaagaaatatatggatccagatacgtataaaacatacttaggttcttttggtgcccgctcatttgatgatatcttatattttattggtaaaaaaagtttaccggcaatgaatctgctggatcgagttgtacctaaaaagtcggggttctttgacagtatttcgaaaatgcttcagcgaaataatcaggtaaatgaaaaacagcagtcttcgcgtaataattcgggtgttgttgttaagggattagatggactaagaattcaactttcaaagtgctgtaatccaattcctggagatgatattatgggctttgtctcacaaggtcagggaattaaagtacatcgtcgagactgcccgaatattcaacagcctgaaatcaaagcaagattgatagatgtttattgggattttgcatccatttcaacgatgaaatttcaagcagatttagaaatagttggtttggatcgacctaatttattgaatgatgtggtaacatcattagggcagatgaaaattaatattttgaatatccatgctgatgttgtagatatgaaagcaatcattaaattaaagatttcagttgaagatgctagtcgtttacaacaagcaatcgataatattgatcggattcagggaatctatgaaattaaacgggttattcattagttattgcaattttatgaaatattatatataatcaatttaatccaatgaacaagattaagtagttaaatccttttatagagagaatacgtctggtgaaagtatttaaaggatcattacgggacacttgggaggagttactttgaaatctagtaggagtaaacgtctgtcgcgttaagacataagagcgtgttatttaacacgaattaaggtggtaccgcgttaactaacgtccttattttaagggcgtttttatattatcaaggaggaaatgaaagatgatgtataaagcaccacgaggaacagtggatattttgccagaaaagagtgctaaatggcaaacattagaacaactaattagaacaatatgtgttaattataatgttaaagaagtgagaactcctatttttgaacacaccgagttattcactcgtgcagttggcgatacaactgatgtagtaagtaaagaaatgtatactttcgctgataaaaaggggcgttcaattacattacgacctgaaggaacagctggagttgcgagagcttatgtagaaaataaaatgttttctaatcctgataaaattagtaaattatattatattggaccaatgtttagatatgaacgtcctcaaaatgggcggcaacgtcagtttcaccaattcggggtagaaatgattggttatgaatcaccatatttagatgttgaatgtatgacaatggcagtaacattagtcgaggctttagggttacaaggtgtcaaattacatataaatactcttggtgatggtgatagtcgtgatgcttatcgtgaagctttgaaagcacactttgcaccatatttagatgatttatgtcaagattgtaaaaatcgttatgaagcaaatccgttaagaattttagattgtaaagtagatcatgatcatccagcgatggcaaatgcgccaaaaacagttgattatttaagtgaagcggctaaggcacattttaccaaagtatgtgagttattagatgatctagaaattgaatatgttgttgatacaaatttagtgcgtggtttagattattactgtcatacagtttttgaagtaatatctgatgatccacgcttaggtgcaggagccactgttggtggcggtggtcgttataatggcttagtacaggaattagggggaccagaagcacctggagttggatttgcttttggaatggaacgattattgattgctatggatgaagaattagaagaacctgaggggttggatgtgtatgttatgccaatgggagatgaagcaagagatttagcggtacagatcacggcaatgctacgagcaaatggctttagtgttgatatggactatcaaggtcgttctttaaaagcacagtttaaaacggttgatcgtttgaatagtcattttgcaatgatcattggtgatcaagaaattgctgacgaagtagtcaatattaaatgtacacattcaaagacacaagatattgtaccaattgaaaatattgttgcgtatattgaaaatcatatggagggacatgtacatgaatagaactcataacaatggtgaattaagaattagtgatgttaataaaattgttgaattaaaaggctgggttgctaaaaaaagaaatttaggttctttggttttcattgatttaagagaccgttatggaatcacgcaaatcgtattaaatgaagaaatggaagctctaggtaaggatattaaaaatgaatatgtcctgcatgtagttggtaaagtaattgaaagaagttctaaaaatcctaatatgccaactggggatattgaaattgaagctgctcaaattgatattatcaatacggctaaagtaacacctatttacacaactgatgatactgatgcaagtgaggatgcaagaatgcaatatcgttatcttgatttaagaagaccggtaatgcagaataaaataattatgcgtcataaaattactagcagtattcgaaatttcttagataatcatgaatttattgatattgaaacgccctatttaaatcgttctactcctgagggagcaagagatttcttagtcccttcacgggttcataatggttcattttatgctttaccacagtcaccacaattatttaagcaattattgatggtttcaggatttgaacgttattatcaaatcgcacgctgttttagagatgaggatttacgattagatcggcaaccggaatttactcaagttgatgttgaaatgagtttcatgactactgatgaaattattagtattggtgaacagctgttagcacaagtaatgaaagatgttaaaggaattgaactgcaactgccattgccacgaatgacttggcatgaagctatggaaaaatatggaattgataagccagatattcgttttggattagagttagttaatttaaatgaagtggttaaagatgttgagtttatggtttttaagagcgcgttagaagctgatgggcatgtaaaaggaattaatgtcaaaggtgaagctgacaatttttctcgtaaagcaattgataaattgacggatgtagttaaaacatataaagcaaaaggattagcatggttaaaagttaaagctggaaaggctgagggaccaattgctaaattctttaacgaagaacaaatgacaaaattattaaaagcaatggatgcaagtgataatgacttattattatttgttagcgatgctaaatataatgttgtttgtgatgctttggcagctttacgtaatcatttaggaaaagaattaaaattatttaaccctgatgaatttgcatttttatgggtcgtagattttccaatgtttgaatatgatgatgaaactgaacgttattatgcggttcatcatccatttactcgacctaaagatagtgatattgataaaattgaaaacgatcctgcaaattgtttagctgatgcttatgacattgtattaaacggttttgaattgggtggaggttcacaacgtatctacgaacaagaattacaagaaagagcctttagagcattaggttttacccaagagagaattgatagtcaatttggctggtttgttgaggcctttcaatacggtactccaccacatgggggatttgccttaggtctggatcgtctagcaatgttacttactggtagtgaaaatattcgtgaggttattgcttttccaaaaaatgcaagtgcagtatgtccaatgtcaaaagcaccaagtgaggtagataatgctcaattagaagaattaggaatcgcggtgattgaagatgaacaagaatagaattgatgcagttgtaaataatatgaaggaagctggtcttgattatttgttgatcagtgaaccttcttcaattgattatttgattgattatgtaaataaccccggtgaaagaatgtatgtattgatgcttgcagcaaatggtgcccataagttgttcttcaataaattattctttgtagaaaatgatctagggattgaaattgtttggcatagcgatactgatgatgcgacaaaaacaattgcagattatgttgaaaattctggtacaattggagttgataaacattggagtgcaaactttttattaagtttaatggaaaaactaccagatgttaaatttgttaatggctcattttgtgtagattttgtaagaatggttaaagatgaaaatgaacaggttttaatgattgaagcaagtcggatcaatgatcaagcaattcatgaagtgattcatcaagtatctttaggattatcagaacttgaagtagccggtaaattgagtggtatttatagcaaatttggtggtgatggcaacagttttgatgctatcatcgcttatggagctaatggtgctaatcctcatcatgaaaatgatgatagccatttaaaaccaggtgacagtatcattattgatatggggtgtaagtataacggatattgctcagatatgacaagaactgtcttctatcaagaagtaagtgaagaagctaaagaagtctatggtttggttcgtttggctaacgaaacagctgaagcaatgattaaacctggggttagactttgtgatattgataaggctgctcgtgatattattactgatgctggctatggcaaagaatttaatcataggttgggtcatttcattggtaaagatgttcatgaatttggtgatgtttctgttaactttgatttggaagttaaagaaggtatgattttttcaattgaaccgggaatttatttgccaggtaaatttggggtgcggattgaagatttagtcatggttacaaaagatggctgtaaagttttaaatagttatccaaaggatttatttgtaatttaatgattaagggttacagctcttaatcattttcttgtcgaataaaaaaacatactttttagggttcggtcaatacatttatcttaaattgtgctaaaatggtgaagtgaggtgacataaagaatgtattattttattggaattaaaggttcagggatggcgccattagcagaaatccttcatgaactaggaaatgaagtgtgtggaagcgatattgataaatacatcttcattgaagaggaattaagaaagagaaatatcccaatctattcatttgatgctaacaacattaaagatggttatacagttattattggaaatgcttttggtgatgatcacacagaagttaaagctgctttagctaatccgaatgttaaatgttatcgatattttgaatttttgggagagtttatggaaaacttcatctcaattagtatagctggaactcatggcaaaacaacgacaacagggatggcttatcatttgtttgaagaatttgataaaactacagttttaattggtgatggaactggtcatgcagtaaaagatagtaaatattttattgcagaatcatgtgagttccaagatcattttttacattattatcctaaatatgcgattatcaataatattgaattagatcatgtcgattattttggaaatttagagcgttatattgagtcttttgaaaaatttgctaatcaagtaaaagatacagtaattgtttggggggatgatccaaacattaaaaaaataaattttaaaaaaagagttatgagatttggtttaaatgactataatgacgttagggcggtaaatgtgcttgaaaacagtaatggtttatcgtttgatgtatatattcataatgaattatttggtcattttaatttaccttattttggaatgcatatgttgtataattcattagcgatcattacgcttggttatttagaaaatatgactaatgattatattcaaaatagaatggcaactttcgagggaacaaaacgacgatacagtgtaactgaagtagggaataatgtttacgtagatgactatgcccatcatcccactgcaattaagtatgtaattgaagcaacccgtgttagatacccgagtaaaaaaattgtagcaatttttaaacctgatcgtttttcacgtggcgctcgttttgccgttgattttgccaaatctatggatttagctgattatccatatttctgtccatttcccgaaaatgcagtgaaagaagaaggaattgacatagatatttatgatatcgctaataatctaccaagagcaaaagttattggtgaagatgaagaagctgctaaagaattagctaagttcgataatgttgtgttcttgtttatgtctagcaaagatatttataaacttgaagaaaaagttatcgcgataaaaaaatctatataagtatctagaattatggtataattatttgtagaaagttgaggtaatgctatgactgcaattgatgtttgttactgtgttttaatactttctggagcatttgccttagttagcttaggaattttattgcttcgtagttcaaccacagttaaacaagtggggaacacagtcgaaatggctcaaagcacaattaataaagcggataaaattatggatgatataacttacaagttagatcttttgaatgcgccagtagaaacaatcgcgcgtttctttgatccaaatcgacctaagtttaatcctataagtgctattattggattgttcaaaaagaaattttagaaaggtgaaataatgatgaaattaggaaaatttattgccggtgtaggtatcggtgcagtaattggaatgttatgtgctcctaaaaaaggtagtgagctaagaggtgaattaaaagaaaagtctcaagatctatatgataaagctcaaaacatgactaaagatgatgttgaatctttgatcaacaatactatcgaagaaatcaaattagcaattgatgaatttgatgttgatgaatttaaagatacagcaggagaaaaattaggagatattaaaactaaattagaacaactagcaacttcggtaaaatctagtgatgaatacgcaagttttaaagaatcggttgctaaagttagtgatgaggttacaacaaaatttaaagaaatcaaaacaaaagttcaagacaaagattttaatgtgttacaagaattagatgatgcaatggatgatattgaagatgaattagatgtcatcattgaggatctaaaagattaatgaaaaaagtaactatttatgatgtcgcaagagaagctggtgtttctcttgcgactgtttctcgagtaatcaacggttcaaatgttgttcgagaaaaaacaaaacaaaaagtcttggatgttattgatcgtttagatttcaaaccaaatgatattgctagaggattggctactagcaaaacaacaacaattgcaatcgttttcccacaatcactatttgctcatgtcaaagatatgattggtggaattggcgatactggtagacatttagattataatatcaatatgtatacgactgatgatattggtgatgaaaatacagttgctgatgttactgaaagattagtaaagtcacgtgttgatggagtaatcttatttaataatgataatattgacgaaactgttgaatcgattgtgaagtataatttacctatcgttgttatcggaacaaaaatgtctggtgaaaacattggttctatttatattgatgttaaaaaagctgctgaggagattgttgataaatatctagctaaaggtaaagatgacattgtctatatcttaccaaaacaaaatttaattaaaagtgatgaaattattgaaggaatcaaggatacatataaaaaatataacaaagagtttactaccgatcaaattgttacaagctctagccattatgaaaatacatatccgaattttgttgaatattttaaaaatcacaaacatgatttagtattctgtggatatgataaagacggtgttgcgattattaatgcagctcaagaaaatggaattaaaattcctgaagaaatggaagtagtaggaatgctgaatacaagttattcaattatgtgtaaaccgaccctttcatcaatgaatgtgcctgtttatgatatgggggctttagctgttcgtttattaactaagttcctacaagatgaagaaattacttcaaaagaaattgcagtacaacatatgtttattaaacgcaattcgacaaatgactaagactttcattatgaaggtcttttttttgtcacgatttataattttcaattgttatttagatgaagggaggaaatttaatggaggaagcaatgttcgaacatctattccaaaagtataaagatatgatatatcgagtcgcttttctttatctaaaaaatgaggcagatgctttagatattgttcaaaatacatttattaagctattaaagaaaaatgattttaacgatgaagagcatcttaaaagatggttattaagagtttgtattaatctttgtaaaaataatttaaaaagttattggaaaagaaatgttagtgtttttgaagaagaattttatcaattagaaaatagtgatttaaaattgcaagaactagtttttaaactggctcctaaatataagggagtgattcatttgtattattatgagggatattcagtgaaggaaatttcagtcattttaaaaattagtgaagccgctgttaagcaaaggttaaagcgagctcgtacaaaattgaaaatagaactggaggcagaatcatgaagaataatgattacaaaaagattgtcaatggaatcaagataccagagcaaaagcttgatctagtaaaaaatagtattttacagaaaaaaagcatctgtaaatttaaatatgctacagctttaatcgtgatagcagctatgatcacgggaacaatttattttagaacttatccaagaggagataatgaaacaaaaacattaatagatgttgattacttcattacaaatatttatgctaatgatgaaacctatgaattaacagacgataaagttagtattgacatgagtagtgatatgtttggaacaacctggagatgtaatgctaaacgctcatgtttaccatttgatattcgtattgttggtgaaaacattaagagtatcagctattctgtaattaaggggacgagcttagatttttatcgggttaaatcattagatttatttcatgatgatttatcggagttaaataaaaaaaatgattttagtatccaatttaaaatgtttaacgaattacgtgatcaagataaagaacttttaaaagaacgctatcagttaacagaagaaaatttagaatcatacgttaatgatcatatcattgatattattaaagattaccgtgcagctttagaacaagcaggctatagtcaggaaagcttaaatatgtatggcggacttttttggatagaaattaaccaaggcgataggatgactgttccttatgatcagcaagatcctctaaactatcgaaatattctttatactgaattaaatttagaaaataaagatatttcagtaatagataacgaacaaataatctatcaaacagttaaacaggaattattaagctatgaaataagcatggtaatagagtataataatggtgttatcaaagaaaaaataattacttttgaagaaggaacttgtgaagaaagaaataatgaatgtagggatactatttatatgaaaataaagtaaatcattaaaattaaatatgattaaaatatttaaatagtatcaggaacgataagttttgacaaaactattagggtatgttgacttatttaaaaatatagcatataattctattacgacgttgaaggaaaatagtaatcaaaataggcattttagagaccttgtggctggtgtaaacaaggatgtactactgatgaatacactctggagtttctaggtgaaaagtctagacgggtagttccgttatgaatgatgagtgcatgtattttatacatgaataaaggtggtaccgcgagatttcgtccttttaggaagaaatctctttttattttataaatggaggataacggatgaagatttatgatgaattagtatggcgtggattaatcaaagatgttagttcaccagatttagaagaaaaattaaataatggtgggatgactttttatattgggactgatcctactggtgatagtctccatattggacatttttcatcatttttaatttcaaagcgattaaaagaagcgggacataatccaattttattagttggtggagcaaccggattgattggtgatcctaaaccagatactgaaagaccaatgattaccaaagagacagttgaacataattttgcttgcttaaagaaacaagcacaagatttgtttggttttgaagttgttaataattatgattggtcaaaggatcttaatttcattgattttttaagagattatggaaaatattttaatattaactatatgttaaacaaagatattgtaaaacgtcgtttagatgcagggattacatatactgaattttcatatatgatcatgcaagcaatggactttgaatggttatacaataacaaaaattgtgttatgcaagtagctggtcaagatcaatgggggaatattactgctggaattgaattgattcgcaaaaaagatggtaaagaggcatatggttttacaatgccattattgactaaaagtgatggaacaaaatttggaaaaactaatggtaaggctatttggctagatagagagaaaacatcaccatatgaaatgtatcaattttttattaactcagaagatgataaagtaattgattatttaaaatttttaactttcttaacacctgaagaaattatggaattagaagaaaagaataaaacgcaaccacatttaagagaagctcatcaagcattagcgcgtgaagtaatcacattcttgcatggtgctgaagcttatgaggaagctgtaaatatttcaaaaatgttattttcgggacaaattcaatcactaacattagcacaggtcaaggtttgctttgaaggtgtaccaagtattgaagttaatgaagacttgaatattttagatgcactaactacttgtggggcagcaaagagtaaacgagaagcgcgcgaatttgttaatggcggatccattttaataaatggtgaacgaattaaagatgttgagttcatagttacaaaagctaatgcatttggaaatgaggcgactgtagttcgtcgcggcaagaaaaattattttgtaattaagcatatttaaaaaagtaagttttataacttacttttttcttggcgtttttttccataacattgtattttcttcgtttgttaaactggtaaggagattgcttttagcttgcggatattttaaatatagatcatttagtaaatgtttaaattcttctcgtttagtatgcttatcagctggacatgttgaagggacaataggaacatgtgcttcttcaacagcactaactatatctgattcgtaagcataaactaatggacgaataaagttcatttcagttcttgttaaatacattttgggggtaaaggttgcaatcttaccaccgtagatcatattcataaatagtgtctcaacagcatcatcaccatgatgcgcaaaggcaactttgttgcatctgtatttctttgcaccatcgattacaagtgcttttttaaatttagaacataatgaacattgtagacgaccatcatcggtcttatttaactttaagatttcatatacatcactaggttcatgataaagttcaataccattttttttacaaaaagcatcagcttcactaaaatccatatttgggaagcccatttcaatatgtactccaataacatcaaattttacagttgcgaattttttatataatgataagcagtataaaaggagcatagagtctttaccaccagaaacgcccacacatactttatcaccatcttgaattaaattaaattcttcatcggctttacgaatacagccaagtacttttttcattgtcatttttatcaccttgctatattctaacaaaaatatcattactaagcaaagttatttgcaatttaatgtaaagataggtacaatgtaaagcggtgatgaaaatggatggaattattttagtaaacaaacctagtggtatgacaagccatgacgtggttaataaattaagacgaatattaaaaacaaaaaaagtggggcattgcggaactttagatcctgatgcaactggtgttttagttgtgtgtgtaaataaggctacaaaagttttgcagtttttaacaagcgaaagcaaagaatatgttgcaacacttagtctaggaacaagtactgatacatatgatgctagtggtaaaattattgaaacaaaagagttccatgctcttgataataatgaaatagttgcttgtttcaataattttattggttctcaagaacaaaagcccccaatctattcagcaattaaagtaaatggtaaaaaattatatgagtatgctcgtgcaggagagcaggtagaagtgccaacacgatcagttacagttaatcatttagaaatattacaaatcgaaaataatttaattaaatttaaagtgggatgttcgaaaggaacatatattcgttctctatgctatgatcttgcgaaggctttaggttatccgggacatatgaaagatttaattagaactaaatcaggaaatttttcgttagaaaattgttttacacttgaacagattgaaaatggtgaatacacaacagtaagtttagaagaagctttaaattcatatcaacaattagttgtagatgatgaaaaaataatttttcatggaaaaaaaatcaaatcagatttaaatgaacaggttgttatcttaaatcggcaggggaaagttcttgcaatgtatggccctgatggaaatggttatttaaaaagtattagaggtttatggtgatgaaagtaatatatttgaatgaagaaaatatgattgctttggaaccaagttgtgttgctttgggtttttttgatggcatgcatctaggtcatcaaaaattgattgatgaagtattaaaagtgtcaaaaataaagaatctaaaaaaagggctattaacatttgacgttcatcctaaatcatatcttttagatagttcttttaaatatttgatgagtctcgaagataaaatagaatttctagaaaaattaaattttgactatttatttgtattacgtttcaatcatcaattagctagtaaggaaccacgacagtttattgacgaatttattattaaaccaaaaatcaagcatgttgtttgtggttttgattttcattttggaaatcatggtagtggcgatagtgtttatctaaaaaataatagaaataatgattatgaaatttcaattattgataaattagaatatgaacagcataaaatctcatcttcatatttacgacaagttttaagtaatggtcaagttgaattggctagtcaattgttaggtcggcaatatcaagtgactggaaaagttgttcatggacgtgaaaacggtcgtaaaattggttttccgacaattaatgtggcagcaatagattatgtacttcctaaaaatggagtgtatggtgctaaagtaatcatcgatggtaaagaatatataggaatggcaaatttaggctataatccaacctttactgctttgaagcaagcttcattagaagttaatattttcgattttgatcagaatgtatatggaaaacaagtaaatgttatgtttattaaacatattcgcagtgagaaaaagtttccttcaataaacgatttaattgaacagttaaataaggataaacagcagataattaatgaaatgatatgattagtacatatcatttttttatgttgctttcctatatttattagttttatttatgaatatctggggaataataaatttggtgatatgatgttatatggatggttaatcttttctagttttttatggggtaccaacgttcttgtaatgaaatatatgttagaaaacactacaacatattttttagctgctctaaaagtactgttgtcggttattgcaatttttgtaatcatgaaatataaaaaaataccttttaaatggtataaaggcagtctaggaataaaggtatcattactttcgattacaattaattttatacttacctttgagggattgaatttaattaccggaagttcaaatgcaattgttaattccttagcaccgctagtgacaatcctattgacatggcttttttatcatactaaggtcaatcgttaccagttgattgctatgataatcgcatgcattggatttcttatttctctagattttaatattagtcagatttctcttggtcatttaatgatgattggtggaattgtgttatatagttatggtaatttattaatgcagcaccaatgtaaaaaagaagacagtttgccttttacatttcaatatttatgtttgagcttctttcaattagcgttaattactttatttattcctagcagcaatcatcttgaaaatatttcaataactttatgggtacttttcataattttttctggaattggatttgctataattcaattaacgtattttcgagctgttcacgaaattggaagtgttaaaacaagttttttattaggactaaatccagtgtttacatatattggttcattgttactacaagaaaattttaattttaataaatttatggcgatgattttaatggttgtagccatggttattgcaaacaaaaaaagatagttagttcataactatctttgataatatttaataagagcttgagtgcctaagttctcaaatccgtcggtttgtaattgttcaaactgttgtaaaacagtatttaaaacttctaagtcaaggttgtttgtatcattaacagctttggctattttcatatctttgatataatgttttatgtaaaaccccggtgcaaaatcatcagcaagaattcgtggggcattattagtcatttgccatgaaccagcagctccactcgaaatacagtcaagcattatttgagggtccaaattgactgctttagcatatgtaagagcttcacaaactccagctaaagctccggctaaagcaatttgattggccatttttgtatgttgaccgtttccggctgaaccaacataattaatgttgcttcctaagacttctaacactggttcaatttgtttaaagacattttcatcaccgccaaccataattgacaatgtcccttttttggcaccaatatcaccgcctgataccggagcatcaagactggctaaactatgttttgaagattcttcaaaaattttttttgctaacaatggactagacgtagtgaaatcaatgagaatacaatcttttttagcattagcaattatccctttggaactaaagtagatttcctcaacatcttgaggaaatcctaccatagtcatgacaatgtcttgatctttgacacactcagcaactgaatcgtgccatataattttatcactaataagatcttcaactttattttttgttcgcgtataaatagatacaggatatcctgcttgactcaaattttgaaccattgctttacccattactccgaccccaataaatgcaatttttttcatttttcttcctccagtaactctttatataatttaattaaacctgcttgaattttatcatgatttttttccggatgccattgtacagcaataatattatctttttcaatgccttcaataattccatcagcagtaattgcactgacaacaaagccaggggcaatatcatcaattgcctggtgatgaaatgaattggtcataaactcatttcctaaatatttatttagttttgtatgaggaatagttttcacgagatgatgatatccttctaaattttcctggagatgattatcatatttttttgtctcaggaatatcctgaatcaaagtaccgttaaatgcaacattgatagtttgaattccacggcaaatccctaatataggtttatgagcttttgaaaacttatgaatcaacttaatttctaattcttccaattctgcttcctctttattggttagaggatttaatacttgatggtataaaacgggatcaatgtcaaatccgccgcttaataatagaccatcacagtgagtgactaaaaaatctagtgtatcatcactgcttggtccaataataataggatctagatttgcagtttgaagcattctaaaatattcacggtaaatataataaactctgcgttgagaatagcttcgcattggcgttaagatttttttattcataaactacctcctgtatttatatattacgcgaaacaaaaataatgtaaagaattataaaaataatttaaaactgcacagatattacttagacatcatatgacacttatggtatactttattagtaagatttataaaaaagagggatgtaatataatggactttttagataatatattaaaaaaatttggaacaaaaaatgtaatcatagtaggggtagtattaattgtaactattatgatcttaataacatactggatgattaaattaagaatatatcgtaaagaaattgtagttttagaaaatgatatgaatgcaattaaaactttgccaattcaataccgcttagggcggattaaagcaattggaaaaaacatgccagatgttttagaaaaatatgatgattttgaactagaatttaatgatttagtaaatctacaaagtaatgaaattgcgccattgatcaatgatattgatgagcgattgttttatcgaaaattaaaaggggttcgcagagatctaaataaattaagacaagatattgataattatgagaaacgttctaaggcgttgcttaaagaaattgaggtgatcactgaaatagaaaatgtgcaacgtgtagaaattattaaaattaaagagaagttccgtttaacaaatgatgaatttgctgctgtacgttttaaaatagaagattttgtacctgctattcctcaaaaatttgcagatattgaagaacgctttgttcaattagaagcattgatgaatagtcagcgttttgatgaagctaaagtatcagcagataaaattgataaagacattgatctattaagtgcttatcttcgtgatttaccaacttatatttcaattgttcgaaaatatattcctaagcgattagatgaattataccgtgttattactgaaatgaaagaacgcgatttttcaattgaacgtcttaatacaacagttcgctataataagattaatgctgatctagaaaatacgatccaagctattaaagagttaaatctagaaaatgttggtgcttccattgaagtaatgacagaagatctaaattctttagcggcagactttgaaaaagaggaagctgcatatagtcgctatgaggaatcacgtaatgcttgttacaaacatattgggcatttagatgaaggccttcgaaatactattaattctttaggtgaacttcaaaggaattatttattatctgattatgaaattactgttaaagaagattatgaggcttttaaagggattttagatgaattagatcaattaacagtaataattgaaagcaatgatttttcatatagtgtcttgattgagcgttttgaagaattgattgatcgttgtaaaccttttgatgaatctttgaataagtatattgaattagaaaattctttgagattacaagaaaaacgtgctttagatgagttagataatattaatattgtcttactagaaataaaatcggagattaaaaataaacatttaccaatgattaatgaatcttataaagattatattgatgattcttatcaaaaagcggatgaaattttgaaatttatcagacgtcgaccaattgatttagagcgtctctcagttcaagttgatgctgcacgagatgtaatctataaattatatgataatgttcataatttgattgttactgcagaaatggttgaagatgcaattatttatggtaatcgttatcgtagttcttttttagaagttaacacagaattaactaaagcagagctgttatttagaaatggtgaatatactaaagctttgactactgcagtagatattattgaaaaaatcaatcctggatcatatgagatgttgattaataaaaatagtgcaaaatcataagattttgcctttttttatgggtgagagtataattatgaagaatgtacaaggtattatagtttaaaagtaatataatggggatattaaagcttattaataaaaataggagataaaaatgaaaaaattattaatttggggtgcaggagatcaaggacttgtgactcttgagtgtgctttagccatgaatgcatatgaacaaattgattttttagaaatcaaagaaaaaggaagtagaaaaataattaatcatactgtatttaaagaaagtgaattcgataaagtagtaaaattatatgatgaggttattgttgcaactggtagcaatgatttacgagaagaaaaaataaaaatgttacttgcttttggtattcctttagcaacgatagtccatccaacagctttaattagttcatctgcaaagattggtggtggtacaacgatattggctaatgtaataattaatattaatacaaaggtcgggattggctgtatagtcaataatggagcaattattgaacacgattgtatggtaggaaattatgttaatatttgtcctaagtttgcgatggcaggtcacagttcgattggatataaatcttatctgggaataggtagtactgtcattgatgatattagaattggtaatcgggtaacagttggtgctggagcggtagttgtttcaaacatttctgataatatcgttgcgattggtgttccagctaagaaaatgctggtggataagtaaaaagtgttgtgttaaaatatttaagataattacaatttgatggtttacgttggttttataaaagtaattatataggaaaattaaagtactttggaattgcaagtaagaaaatgattttatttctttactttcgtagtaaatattgtagaattatttaatgttgtttgaaagatattttggtggagtcataagactttggatttttattgcatataataatgtagggggttacgatgatatatttagattatgtggcaacaacgccattaaattcagaagtgttaaatacttatcataatttattatccaattatttttataatgctgattcaatgtatgataaaggtattgaggtaaatcgtttgatggaacattcacgtaaattaattagtgagtccttcaaagttaaagaagatgaaattatttttactagctgtggtagtgaagctaataatatggcaattaaaggtacagcctttcaatatcaaaatcgtggtaaacatattattactacagctattgaacattcatctgtttatgaaacttgtaaagagttagaaaagttttttggatttgaggtaacttatttaggggttgatcataaagggcggatttctttagaagaattagaaaaaagtattcgtgatgatacgattttagtatcaattatgtatgtaaataatgaaattggggtcattaatcctattgatgaaattaaaaaaattgttaaaaaatacgataaggtaaaactgcattttgatatggtacaggctttaggaaaattaccaatcgatttaaatgatgtggatttagcttctttttcggcacataaaatttatggtttaaaaggtagtggcttattattcaaacgacgttcaacgacaattgttcctttaattagtggcggacaacaagaatttagtttacgaggtggaacttctaatgcctgtactaatattgtttttgcgaaaactttaagattagcattagataattttgaacaaaaaaatcaacatattaaagatataaatgattattgtcgaaaatgtttacaggagatagaaggaattgttattaatagtgatgaaaattgctgtttaccatcaattttgaatttctcatgcttaggttataaaccagaagttattttacatgatttggaaacaaaagaaatatatttatcaacgcgtagtgcttgttcatcaaaaacgagcaatgtttcacgagtcatggcgcaattacatttagatgaagcaattagttctagtgcgcttagaattagttttggagagcatactacaagagaagaaatcgatcggttttgttattatttacaagaaagtatgcgtaaattaaagaagcagaggtagaatatggaagcaaattatattttagtacgttttggtgaattaacaacaaaaggtaaaaaccgtaaattatttacgaatcgtcttttaaaaaatactaaggagatattagcagaatttaatcatttaacatatgatttacaacatgatcgtatgtatgttgttctaaatggtactgatcatgaagctgtatgtacgaaattgaaaacagtatttggaatctattctttttcagtagcatataaaatggaaaaaaatctcgaattagctaaacaagcggttttacaaataattgaaaacaatgatgggaatacgtttaagattaatactaaacgttcagataagaatttccctggaagttctcaagaaattaatcgtgaaattgcaggatatgtatttcatcacactacaaaagaaataaaagttgatgtccatgctccagcaattttagtaacagttgaaattcgttatgacgcgatatatgtaatggataatattattaaaggagcaggtgggtatccagttggagttggtggaaaagcattattgatgatgtcaggaggaattgattcaccagtagctggatatttaacattaaaacgtggtgtagatattgagtgcatccattttgctgcaccaccttatactaatgaattggcacgagaaaaagtttttgatttagttgataaattacgtcattatactcacggttcaattagagttcatgtaattaattttacaaaattgcaattagctgtttatgataattgtgacgaaagttatgcaatgacagtcatgagaaggatgatgtatcgtattagtgaaaaaattgctaataaaaataattgtcttgcattagtcaatggtgaaagcattggacaggttgcttcacaaactttaaatagtatgcaggtaatcaatgaagttgttaagattccagtactaagaccagtattatgtcttgataaattagaaattattgatattgctgataggatcgatacttatgaaatttcgattcgccctcatgaagattgctgtactatttttacacctaaagctccggcaactaagcctaagttatataaagcggaaatatttgagtctgggtttgattttgaaactttgattgatgaatgtgtagaaactgctgaaattattacagtcgatcacaattataagaaaaacgacgatattttttaaaaataattaaaaaagcgtatatctttttttgtttgacacaagatattagtgtcaggaggtgaagatatatgtcacaaagtaactctagtagaaacaaattagttgttcctggagctaaaaatgcaatcgatcaaatgaagtatgagattgctaacgaatttggcgttaatttaggtcctgatacaactgctcgtgataacggttcagtaggtggcgaaatcacaaaacgattagtcgctatgggtcaagcacaaatgagctcatcaaacaaatacaatcaatctaaataattatttttaaaaccctagttagctagggtttttatctttaaaaaataaatttaaatttttttattaaaaatgtatattttaaaacaaatgacacaaaatattactgtcaggaggtgaaaatatatgtcacaaaataactctagtagaaacaaattagttgtccctggagctaaaaatgcaatcgatcaaatgaagtatgagattgctaacgaatttggcgttaatttaggtcctgatacaactgctcgtgcgaatggttcagtaggtggcgaaatcacaaaaagattagtcgaaatgggtcaatcacaaatgagttcatctaataactacaatcaatctaaataattatttttaagaccctagttcaatctagggttttaaaatattcttaaatataaaacaaatttattcgataattccaataaatactttaataaatggtgaaagtgctttcaaaatatattgagtttagtgttgaatttaggtacaattaatatatgacatgaagaaataggaggaattataatggttaaagtaatggcaatcaatgctggtagttcatctttaaaattccagttgatcaatatgcctagtgaagaagtaattacatcaggattagtcgaaagaattggactagaccaaggtaacttcgaaatgaaatataatggtgaaaaatttattaaagagtgtccaattaaagaccatagtgttgcagtacaattattattagatgctttagttgatcaccatgttgttgaaagtttaggtgaaatcgaagcttgtggacatcgagttgtccacggtggcgaatattataacgacgcggttaaagtcgacgaggaagttgttgctcgcgtagaagaattagctgaattagcgccacttcacaatccagcacatattgttggatataatgcatttaaagcagctttaccagaggttgaacatgtttttgtatttgatactgcatttcatcaaactcttgatcgggaaagatatttatatcctttaccatatgaatactacacagatctaaaagttcgcaaatatggtgcccatggaacaagtcataaatatgtatctcaagttgccattgatatgttaggaaatcccaaacattcgcgagtaattgtttgtcatttaggaaatggtgcaagcatttcagcagttcaggatggtatatgtattgatacttcaatgggatttacaccactggcaggagtaatgatgggaacacgctgtggtgatgttgatccatctattatgccgtatttatgtaaaaaattaaataaaacacctgatgaaattttagatatctataataagaaatcaggaatgttaggaatttctggaatttcttcagattcccgtgatattgaaaatgcattatttaagaacggtgatgaacgtgcacttcttacaggtttgttatatgcacgaatcgtttcaaaatatattggaagttattttgttgaaatgggtggtgttgatgctattgcctttactgctggagttggagaaaatgcttcttatcttcgtcgtttgatcattgataatgtttcacgtgcgttaggcgttttcttaaatgaagaagaaaatgaacgtcgtagtaaagaaaatcgtctaatttcccatcaatattctaaagttgatgtttatgtaatccctactaacgaggaagtaatgattgctcgtgatactgtaagaattttaggtttataagctctgatcaataatcagagcttttctatttataaatttgggtaaatatggtatagtcatcttattaaatagaggagttttataatggaagaaaaaataattgctaaaattgaagaatatgattatattgctatttaccgtcatgtaaatccagattttgatgcttttggcagccaattgggaatgtacgatatgattaaagctacttatccagataaaaaggtttttttatgtggtgatttcagttcggaattagtgaaaaaatatacagtagtttttgaacatcaagaagttgattatactaaagatattttaggaattgttcttgatactgctaatattgaaagaattgatgatcaaagatatcaactttgtaaagaaattattaaaattgatcatcatttggtcgtagatagttatggcactttaaattacgaagatagtagtgctagttcagctagccaattagttggaacaatttttaaagatacggctatgaaaattactaaaagtggtgcagaagctttgtatttgggaattgttggagatacagcgcggtttatgtatcgaaatactgatgaacggacttttgcagtagctggagctttggttcaagaaggaattgatattgttgaaatctataatcgaatttatatgaagaaggctaaggatttacaaattaataaatttattttaaataatcatcagtttgatggtggtgttgcttattatgttttaagtgatgcagatttaaaaatgttagaaattagtcgtgaaagaggttcggactttgttaatttattatctggtgtagaagaatataaaatttggatggctctaactgaaaatgtcgctgatcataattggcgtgttagtttacgttcacgtgattacgcagtcaataaggtggctgaaaaatataatggtggtggtcatatgctggcaagtggcgcaaagttagcttcattagaacagcttggtcaactgcttcaagatttaaaggagataatcaatgaataaatttactgacatatttgcaaattttattgagggtttttcatttagacaaggttctcaagatgtaaaacaagtaaaaaaaggtgcttttttaaaggcgtttacaataactttaataattggattgattggtgaatatgcttttttgatcccattgaatcttcgttcaccacaatttataatttatttttgtatattattattaatatttaatggactatattttatgttaagtcaaagatttagtaagatcaccaaatatagtctcattgtgattggaatattaattgcatatgtggccattgggacatttgttagttcgcctatctttaatgcaggaagttatcaaaaacaattaaagttagataagaaagcagacttctatgctgacaataaaactatttcctatcaatcgattccagtggtggatcgagatagtgcgattaaattaggtgatcgtaaaatgggacagatggttgattatgtatcccaatttgaggttgatgagtcgtatgaacaaataaattatcaagatacgccatatcgtgtgacaccattagaatatagtgacttgatcaaatggtttactaaccgtagtgatggactgcccgcatatatccgagtaaatatggtgacgcaagaatctgaagtagttaaattaaaagaaggaatgaaatattctaaatcagaacattttggacgtaaaattgaacgtcatttgcgtgctaattatccaactttaatgtttgatacattggcttttgaaattgatgaaaaggggaatccttattggattgcaccagtatataattataaaatcggtttatttggtggaaaagatataactggagctgtattagttaatgcaataaatggtgatcatgaatattatgatattgataaagtaccagaatgggttgaccgtgcttatccagcagaactggttttaagtcaattagaaaattatggtaaatatacaaatgggtattttaatactttattttcgcaaaaaggagtattacagccaacctctggttacaattatgtagcaatcaatgatgatgtctatttatatactggtttaacatcggtatctaatgatgcttctaacgttgggtttgctatgattaatttgcggactaaagatggaaagtattataatatttctggagctgaagaatattccgcaatgtcttcggcggaaggtcaagttcaaaacttgaaatatacggcaacttttccgattttgatcaatgcgggagggcagccaacatatttcttatctttaaaagatgatgctaaacttgttaaaaagtatgcttttgttagtgttgaaaattatcaaatcgtggctaccggtgacagtgttgctcaagctgaacaagcatattatgctttattagaagctaatggtaaaaaaactgactcaagtgaatataagactaatgagttgactggagcgattactgcaattaatgaagctgtcgttgatggtaacagtacttattactttaaacttgaaggtagtgatacgattttcatcggagatatcagtttatctaatcaattcccattagcaaaagttggtgatgttgtaaccattgaatatgttaatagtaaagacaatagcgaggtaattacttcaattaaatttggttagtctttaatagaacaagaagctataacttatatataggttatggcttttttatatttattatcatctctttaaactcaagctattttgcttttgtaactatatatttagttaataaaatgtgttataatcttacagtgaattgaggtgtaaagatgaaagcaaaagtactagtagttgatgatgaaaaagatattagggaattaattaatttttatttgaataaagaaggatttgaagttctggaagctagcaatggtgaagaggctttagaaatattcgaaaatgaatatattgatttaggaatcattgatgtcatgatgccagttatggatggttttgaactagtagaaaatctaaaggaatttaaagatgttccagtaattatgttaacagcgaaaggtgaaagtaaagataaacttcgcggtttttctgttggtgctgatgactatgtagttaagccatttgatccaactgaattaatggcacgagtgcgagcagttttaaaaagatatagtgttaatacatcaaatataatcaaattaaatgaagttgagtttgatggcgataaatatgagatacgttatcagagcgaaatcattcatttaccgttaaaacaatttgaattagtttttgagttagcaaagcatccagatcagatttttagtcgtgaacagttgattgaaaaaatttggggaatggactatgatggctttgatcgtactgtagatgttcacattaagcgaattagagaaaatctaggacacttaccaggatttaaagttgtaacggtgagaggacttggatacaaggttgaagtcgaatgatgaaatctatttatggcaagctgatttgcggttttttaataactatcgcatttagtttttcggttgctggatatgtagctttacgtaataattatgatcaaattgaagatatggctaagagtgagttgagtgcaacaagtgaatatgttgtaggtattttaaatagccttgatgatgctaatattaacgatattatgaataaatacgcaattagctcagaggtttatataacgttgtattcaccagaattggactattatacatatggtgaaaacaaaggatattttcctagtcgcgagacaatgattcaatattatcatgatgaaaacaaaaacgggcgtttcgatgagcgcaaaagtgtgcaaacctatggcagcaaggcaaaaatcaatggttctgatgtatatatatttattcaaaaggatactagttatgaaaaaggaatttttgctaattctgctgttttgattttgggttgtgtctttttatcaggaaatctagtttttttagcgattgctgatattattgttaaaccaataacgagattaactaacgccactaaagaattatcaaaaggaaattatagtgttcgtgttaattatgtgggtgatgatgaaatttctcgattgaatcagggatttaatcaaatggcacagcagttagcgaaacaagaagaaacaagacaaaagttcatttctgatatttcgcacgaatttcaaactccattgactgcaattcaaggctttgccaatattttaaaagaggaagatcttcctaaagagcagcgtcaaaagtatgctgatataatcttatttcattcaaaaaggttatcgactctttctaagaatatgctgcagctgacgttgttggaacgagaagaggttgagttagaatttacaacatattcaattgttgagcaattatctcgggttatttctactcaagaaaaccaagcaattttaaaggatatagaaattcaatttgaaaaaccgcgcaaagatattatggtttatggcgatgaacaacgattggaacaagtttggatcaatcttatttcaaatgcaatcaaatatactggtgaaggtggtcttattacagtaactgttaaaaaggcttctcgtgaagttgaagtatcaattgaagatactggatacggaatgtctaaagaagttgtttcacatatatttgaacgtttttatcgtgaagaaaaagcccgttctgtagaaggaaatggactagggttatcaattgtaaaaacaattgtagatttacatcatggaaatatagatgttatttcccaggttgatgttggctctacttttgtagtaaaattaccaagcgaacgaaaagtttttgatattaaagaaaaactatcgtttaataaataatcggaggaatttatggaattacttaaagagagaatattaaaagacgggattgtaattatgccggatatattaaaagtggatagttttttgaatcatcaaattgatcctactttgtatcgacaaatagctcaagaattcaaagctcgttttaaagacacaaaaattactaaaatcttaacaattgaagcttcgggaattgggattgctttagcaacagcttttgaatttgatgatgcacctgttgtctttgcaaagaaagggactgcaaaaacaacaagtacacattattatagttctaaagtacattcatttactaaaggaattgattatgatgcgattgtcagtaaaaaatatttagataaagatgataatatcttaattatcgacgattttttagctaatggtcaagctgtattaggtttagttgatattgttaaacaagcaggtgcaaatattgctggtgttggaattgttgttgaaaaaggttttcaaacaggtcgccaattaattgaagaaaaaggctatcgtgtggaatcgttagcagtagtagaagcatttagggatggtgcggtgatcctgaaataatgagaggaagaaagtaatgtatttaaaaagaattgaattacatggttttaaatcatttgctgataaagtcaatgtagaatttcaacctggaatcacaggaatcgtaggtccaaatggttgcgggaaatcaaatatctctgatgctgtacgttgggttttaggagaacagtcagttaaatcgttgcgtggtgcaaatatgtcagatgttatttttgctggaagcgaagatcgtcgggcacaaaatttagctgaagttaccttagttttcgataacagtgatcgttttatgaaatatgattataatgaagtcgagattacacggcgactttatcgtatgaataatgaagcggagtatttaatcaataaacaatcttgtcgtttaaaagatattattgatttgattatggatacaggtctaggaaaggattcgttatcaattatttcccaaggcaatatttcttcttttgcggacaataaaccagaagaacgtcgtggtatttttgaagatgcagcaggagtttctaaatataaaaaaagaaaattagaatcgattcgtaaattagaacgtactaacgaaaatcttgaacgaattggtgatatcgtagtagaactagaaaaacaggttggtcctcttaaacgtcaaaaagacaaagcagagaagtatttagcgttgaaagaaaaattaacagctatagaagttaatgttttaataaatgagataactgaagcaaaaaaatcactagatgaattgagtaaggtaatcaaggacttaaatgagcgtcaagcttctttagaggctgatattttgcttaaagagagcagtaacgatgaaataaaaaagaaaatgtttactctcgaccaagaaataaatgctttacaaagtaaactattagaggcagtatcaaatgtctcgaaactagagactgccaaagtcgaagttgatcaaaagcgaaaacatgcacttgagaccttaagtaaagaaaatttaaaagaaaatatcgctaatatgaaggcgattttaagtgatgttgttaatgaatataatgatcgtgtggaacgattagataacactcaaaaagagttaaccacgataattggacaacaagaggagcgtaataaaaaattacttttattaaaaaatgaaattgatcaattatcaaacaatattaataaaaataaatcacgaaaagagattttaatagatgcgattgaaaataaatcaaattatcatcatggcattaaaacagttttaagtcttgctaaaagtaataaaaatattattggtgttttaggtgatttaattacagctgatgaaggatatgaattagcgttgtcttcagctttagcaggagcaatagagtttattgttacaacagatgatttaactgcacgagatgcaattaaatttttacgtgataataaagcgggacgagctacttttttaccaatcagtgctatgaaaccacgacatgtgcgtgaagaacatttagttgtttgtcaaaccatggaaggatatttaggtttggctagtgattttgtaacatatgaagatgagattgctgccgttgttttaaatcaactagggaatattattgtagctaaagatattgatagtgctaatgaaatcagcaaagcaactttttctcggtacaaagtcgtttctcttgaaggtgatgttgttaatgttggcggttctttgacgggtggaagttttaatcgtcaaaaatcttcaatagttcaaaaacgtgaacttgagcaggttgctgttactcttgaacaacaagaaaaagaacttgggcttaagcgtaatgaacataatggattggataatgaaatcaaagaagtttcacatgctctattacaaaagcagatggcatatgctaaattggaagttgttgttcaaagcaagaaagaagagttgatcaaggcaaaatccgagtatgaatcattagctgatcaaagtgttgaattagaagaatttgctagtggaaaaacagaaagtaaattagttaatcagttaaatgaagcgattaaatatcgtgataatttaactgaagaaattaaatcaaaacgtgaacttagaatggcctatgttaatcaaaatgaagctttagatgttgaattgcgtgaatatcgtaatgatttaaaagaggttcaaagtgaggttaatactagtgctattaatgcaacaaaattagaagcaatgttaaataatcatttagctagattaaatgatgaatatcggatgacttatgagtatgctgtcgagcattaccttgatgaaattgatgttgaacaagctaaattagaagtatacgaattaagaacaaatattaatcgtttaggaaacgttaatgttgatgcaattgaagaatatcaaataatcagtgagcgttatgagaacatgaatactcagcgtatagatttgattcaagcccaagatagtatccttgaagcgattaaagagatggatgaaattatggttgagcgtttttcagaaacgtttgagaaaatcaacgaagagttcaatcatgtctttaggagtttatttggtggaggaaaggctagaataaagtatactgatcctacaaatattcttgaaactggaatcgatattgatgttcagcccccaggtaaagcagtccagaatattacattattttcaggtggggaaaaggccttgatcgctatttcatgtttatttgcaattttacgggtacggccaattccgatgtgtatcttagatgaggttgaagctgcattagatattgcaaatgttgaacgttttgctaaatatttaagagaattttcgggaacgacgcaatttattgtggttacccatcgtgaaggaacaatggaagaatgtgaccttctttatggagcaacaatgcaacaaaagggagttacaaagttagttagtgtcaaattagaagaagcaatagatttaacagatcaaagttaggagaaatcgtatgggattttttagtcaaataaaagaaaaattcgttggtaaatctgctaaacaaaacgaaaaatatgtagctggattagatcggtctaatagtactttttcagatcgaatcaatgaacttgcagctcgctttagagaaatcaatgatgagtattttgaagaattggaaaatattttgattatgtccgatgttggagtttcgatggtaatgaagatagttgaagaaattaaaaacgaggtacgtttgcaaaatattactgacccaaaagagattaatgagatcatcgttgataaaatgttcgttatttatgcaaatgatagtgtcatgacaactaagattaactatgctgaggaaggattaacagtaattttaatggttggagtaaacggggctggtaagactacaacaattgggaaattagctaatcgtatcgttaatgatgaaggtaagaaagtaatggttgcagctggagatacttttagagccggagcgattgatcagttagcagtttgggcacagcgtgttggtgtcgatattgttaaaggtaaagagggcggtgatccttcagcagtggtatttgatgctttaaaacaggcaaaagaaaaaaatgttgatgttttaatttgtgatactgctggtcgtcttcaaaataaggtcaacttaatgaatgaattagaaaaaatgaatcgtattattaaacgcgaagtacctgatgcaccgcatgaaacactgttagttattgatgcaacaactggtcaaaatggtgtttcacaagctgtggaattttctaagatcactgatgtctcagggttagttctaaccaaaatggatggaactgctaagggggggattgttctttctatcaaagatcaattgaatatacctgtaaaattcattggtctaggagaaagtgttgatgatttacaagaatttgatttagaccagtatatatatgggttatgcaaaaacctagttgaggaatagtatggaatcaagtttagagaaaaaacaacgagttaatctactaatggattgttatagtgatttgttgacagaaaaacagcaaacatatttagaatattactatcaagaagattactctttatcggaaattgcacaaattttggatgttagtcgtaatgctgtatttgataatttaaaaaaagcggttcatagtttagaaaattatgaagaaaaactgcagttgttaaaaaaacatcaagaaaggcttgacttgatccaaagaattgaagatgatatatctagtgatcataaaagtctagaagaatatttagaattattaaggaagatttagaaaggggtatttatggcatttgattcattatcagaacgtctgcaagggactttaaagaaagtttctggacaagggcgtttgactgaaaaaaatatggaagaaatgcttagcgaaattcgcttagcattattagaggcagatgtaaactttcaagttgtaaaagagtttattgctgcaacaaaagaaaaagcgttgggacaagatgttttaggttcattaaaaccgggacaggttgttgtaaaaatcgtccatgacgaactagtttcgttactgggaacaagtgttgcggaagttgattttgataagaagccaactgttattatgatggttggacttcagggttctgggaaaactacatcttctggaaaaatcgcaaaattaattaccaagaaatatggtaaaaaaccattgttggttgctgcagatatttatcgcccagctgctgtggatcagttaaaaacattaggtgaacaattgaatgttcctgtctacgaaaaaggggcatcacaatctgctgaatcaatcgtagaagaagcgatgacatttgctcgtgaccataataatgacgtaattattatcgatactgcggggcgtttacatattgacgaaccattaatgaacgagctggctaatattaaaaagatcgctcatccaagtgaaattttactagttgttgatgctttaactggacaagatattgttaatgttgccagttcatttaatgaacagttgagcattactggggctgttttaactaaattagatggtgactctcgtggtgggggagctctatcaattcgtcatattacaaatgtaccaattaaattcattggtactggtgaaaaattagatgctatcgatttattctatcctgatcgtatggctgatcgtattttgggaatgggcgatgttgtatctttagttgaaaaagtacaagatgtatatgatgaaaaagatacaatgaaagcctataaaaagatgcaatcgggacaatttggtcttgatgacatgctttctcaaatgcagcagttaaggaaattggggccactatcaggaattatgaaaatgattccaggaatgcctaagttaccaaaaatgaatgatgaggactctgaaaagaaattaaaaatgactgaatcaattatcttttcaatgaccaaagaggaacgtcgagatccaagtattatcactttatctagaaaagagagaattgctaaaggttgtggtaaagatgttgcagcagttaaccgcttgctaaaacaatttgaagaatctaaaaaaatgatgaagatgttaggtaatgttgatcctaatacaggtatgccaatgccagggggacgtgcaaagaaccctaatatcggtaatcctaatcgtaaaaaaatccgtcataaaaagaagaaaaaatagcctgataaattcaggctttttattactaaaggagaatatgaatgactcaaaataaatatgatgatccagccttttttgaaaaatatagtcagatgtcgcggagtaaaaatggattagagggtgcaggagaatggcatgtattacaacgagttttacctgattttacaaataaaacagtattggatttaggttgtggatatggctggcactctatttatgcgattgaacacggtgcaaaaaaagttatcgcaagcgatatttctagcaaaatgattgaaacagcaagaatcaaaaacaatgatccgcggattaaatatgaatgcatttcgtttgaagaaagtaattttggagaagctgtatttgatattgttatttgctctttaatgattcactatttaccttcctaccaagattttgtaaaaaaagtaaataaatggttaaaaacaggtggatatttggtgtttaatgttgaacatcctgtatttactgctaaaggagatcaagactggtattataatgaagctggtgaaattgagcattttcctgtagataattattatcttgaaggaaaacgtgaggcggtgtttttaggagaaaaagtaattaaatatcatcgcacattgacgacttatttaaatgaactgttaaatggcggatttgaaataattcaagttaaagaaccaacggtaagttcaaatgcccttattgcacatcctgagtttaaggatgagttacgccgcccgatgatgctgattgtttctgctagaaaaaaataaacactgtcaagtaaaaaagcttgacaccttatctagagtatgataaatttagtgagtaaattaattaggaggatatgtatatggcagtaaaattaagattattaagaatgggtgctaagaaagctcctttctatagaattgtagcagcagattcaagagctccaagagatggacgttttattgaactattaggaacttatgatccacgcactaaccctgcaaaagttacaattaaagaagaagaagtattaaaatggttaaacaatggagcacaaccatctgatacagttaaaaacttactatctaaagaaggaattattaaaaaatttgctgattctaaatcaggtaaataatcatggattacgcaaagattcttaaagatatcgcgattgaattagttgaagataaagaccatttagaagtacgtgaaatgccgtcgttagaagaagatgtagtggtactacatgtttattcagctaaatcggatattgcgcgattgattggtcgtaaaggtatgatggctaattcaattagacagcttatgtctgttgctggtcgcatggccaataaaaaattagatattaagtttgaatcgtatgaacaataaaagatgtgctgagcacatcttttattatatggaggactaatggaaaaacttaaaattggaaaaatagtaggaacacatggcttaaagggagaactaaaaattagatcaaatagtgattttgctgataaaagatttaaaaaaggaaacgaaattattataagttatcaaaatcaagatttggtctataaaattattacatcgcggatacacaaaggaaattatttagtatcatttagggataatcaagatattaatttggttgaaaaatatattggttcttttgtttatgggtataaagatgatgaactcttagatgctgatgaatatttttatacagacttaattggaatgcaggttgtttctacagagggaacaaaaattggtccagttacttcaatttatgataatactcgtcatgatattttaaatattgatcataatggtaaaaatgttgcaataccgtatgttgatgcatttattaaagatgttgatgtagaaaagaaaattattgtagttatgctaataaaggggcttattgatgaagattgatattttaacattgtttccagaaatgtttacaggttttttaaatacgtcgatcatcaaaagagcgattgacaaaggtttagttactattgaattacatgattttagagagttttctattgataaacataagcatgtcgatgattatccttatggcggaggacaagggatggttttaatgtgtgcaccaattgttgaatgtctcaaaacaattgcaactgatgatagttttattatcttaatgtcacctcaaggcattactttgaatcatggttgtgctgtagaattgtcagctaaaaaacatttaattatcatttgtggtcattatgaaggttttgatgaacgaatccgtgattatgttgatatggaattatcgattggtgattatgttttaactggtggtgaactaggaagtatggttgttagtgatgcagtgatacgcttattagatggagcaatcaaagaagacagtcatatggatgattcttttagccatggactgcttgagtatcctcagtatactcgcccacaatgctatgatggtaatgaagtgcctgaggtactaatgagtgggcatcatgaaaatattcgcaaatggcgcaagttccaatcattaaaaaagacctatttgaaacgaccggacttattggaatcgtatcaatttgatgctgaaagtatcgaaatgatgaaaaaaataaaagaaaatgattgatttttatgattgattagtctataatgtaacagtcgcaagactgcagatgttccgctggttaatcgaatgaacgtttaagacaaaattttgataaggagaaatagtaatgaatttacaattagtagaacaaatcactaaaaaacaaatgagaaatgatattcctgagttcaaagcaggggatacattaaaagttttcgtaaaaattaaagaaggtgaaaaattccgtattcagttatttgaaggagtttgtatcgccagaaaaggtagtggaatttctgaatcttttacagtaagaaaaatctcttaccaagttggagttgaaagaactttccctgtccacactccaattattgatcatattgaagttgttaaagttggtaaagtacgtcgtgctaaacttggatacttacgtggattatctggtaaagctgctagaattaaagaaattagaaaatagaaatggctcgccatttcttttttttctaattttttgtataatagacataatgtaggaggacttttttatgtcaaagaaaaaagaagttatcaagttttcactacaactattggcaatcgttgcagttacaactgtaacctttactaaaataattattccggtgagggttgatggtcaaagtatgtatccaactcttcatgatgaagatattgcaatagtaaatgcgttatcacttgagcgaagtgatataaaacgttttgatatagttgtattgaaatgtgaaaaattggataaggatattgttaaacgggtaattgggttacctggtgatactcttgtttatagagatgataaactatatattaatggaacatactatgatgaaaagtacttgaataaagattacatcgcaaaagctaaaataaaatatcaaacggaactatttactaatgattttgaaatcacattaaatgacgatgagatctttgtattaggtgataatcggttacaatctgctgattctagaactttaggtacatttaaatatagtgacattataggcaaaaaaggtttagttattttcccgttaaaaaatatgaatttaattaagtaggaggtttaaaatggtaaaacagattcaatggtttcctggacatatggctaaagctcgtcgggaaattagtgaaaaaatgaaattgattgatatagtgatagagcttgttgatgctagggctccactatcttcaaaaaatccaatgtttaacgaaatttgtaataataagccaaggttgatcgtaatgacgaaaaaagatttagcggattctaaggcaacaagtaagtggattgagtattttaagggaaaaggtatttatgcaatttgtgtgaatttaaagaattttaatgaatatcagttggtcattgatgtatgcaaagaaatattgaaagaaaaaatggaacgtgaagctaagcggggattaaaaccacgggcaatgcgagcaatggttttaggaattcctaatgttgggaagtcaacttttataaatcgtttagcaaaaagaaaagcgacagtaactgggaatcgacctggggttactaaagctcaacagattataagagtagacaaagattttgaattattcgatacgccgggagtgttatggccgaaatttgatgatttgaatgttgctcgaaacattgctttgatcgggtcaatcaagcaagatatcttaccacttgatgaattgtttatttatgctgttaattatttagaaacccattatgcaaacattgtttgtaatcgctacaatattataatcgacttaaataccgattgggtagaaaaagcatatgatgatattgcaaaaaatcgtaaaatcaaaccagtgcgtggctatactgactatgatcgggttatggaagtgttttttaatgatatttttgatggtaatatggggaaaataacttgggagttgccaaatggaacgctatgagtatgaagaaaagtattatcaagctggatatgactatatcattggtttagatgaagctggtcgtggtccgatggctggagaattggttgttgctggagtggtttttcctaaagggttttatgatgaaagaattaatgattcaaagcagttaagtgctaaaaaacgagaagtattgtacgatttgattattgaaaatgcattatattatgatattgaaattattagtgttgcagatgtcgatcgtttgaatgtgtaccaagcaagtaaacaggggatggaaaaatgtttagaactactaaaaaaagagaagatgtttgcattaacagatgcaatgccgattgattatcctgaccatctttcaatcattaaaggtgatgctaaaagtatctcgattgctggtgccagtatattggctaaagtgacgcgtgatcgtttgatggaagcttatgctttggagtatcctgaatatggttttgaaaagcataaaggatatgttacgaaagcacataaagaagctctgggaaaatatggagtttgtccaattcatcgtaaatcttttggaccggtccaaaagatattatcaaaacagatgtcatttgatttttaatgacattttttgatttttaaaagtaattttaagtttaatgaagtatataataatgaggtgataaaaatatggaagaaatcttattatatttttcattaaaatatgcaggtgattttgattcgattttaaaagctttagagtgtaaagaaaagatagatgaaaaattgaaaaaagaattgtttaaagatattacagccaattacactactttgatctcgccagattatccaactgctttgaaagagattgcctgtccgccattcgttttattttattatggtaacttagctttggttaaaaataaatgtattagtgtaattgggaagcgacatcctagtacatatggcgtagaatgcacagcagcactagcagcacagttggttgaagcaggttacacaattataagcggtatggcaatgggaatcgatacgattgcacatcaaagtacaattacagctaatggtcaaacaatagctgttttaggaagtggtattgattattgctacccacacagaaatcaacagctgtatcaggttttaaaagatcatcatttagttatcagtgagtatccgggaaaatttataccacaaaaaataaattttccaagaagaaatcgcataatttcaggattgagtgaatctatattagtaactgaagcaaatcagcaaagtggtacgatgatcacagtcgggcacggtctagaacagggaaaagatatatattgtgttcctagccgtatcaacgatgctttgggttgcaattatttaattcaacagggtgctaaattagttataaatgtgagcgacattcttaatggataaaaacagttttaaaaaatttagttgacaaaactttaaaaaacactaataattgtgttaatcgcgtggaggaaatgaaatgagcaaaaaattagttattgtcgagtcgccatcaaaatccaaaacaattgaaaaatatttagggagtgattatgtagtcacttcgtcaaaaggacatgttcgggatttggcaacttcaggaaaagaagggttaggtgtcgatattgaaaatcaattcgaacctaaatatgttataaataaagacaaaaaagatgttgttaaggaattaaaacaacttgtaaaagaatcagatgatgtttatctagcaactgaccctgaccgcgaaggagaagcaatttcatggcatttagctcaagtattaaatgtcgatatggataaagaaaatcgtgttgttttcaatgaggttacaaaggatgcagtagttgatgcactaagtcatcctcgtaaaattgaccaaaatttagttaagtctcaagaaacaagaagggttttagatcggattattggattcaaactttcaaaactgctacaaaaaaagatcaaatctaaaagtgcaggtcgtgttcagtctgttgcgttaagattgattgttgaaagagaacgtgagattgaagcttttgttcccgaagaatattggaaaataaaagcagaatttgagaaagacaaaattgaatttagtggtgaactagctaaatataataataagaagattgagataaaaaatggtgaagaagctactgcaatttatgaagctttaaataaagaatttgaaatcgctagtgtcaaaaaaacgactaaacggcgtgaatcaaaaccaccttttattacttcgactttacaacaagaagcatcttctaaattaggttttaaagcgagaagaacaatgtcaattgctcaaaagctttatgaagggattactttagaaaatgagacagtcggattaattacttatatgcgtactgactcaactcgtttatcagatacctttgtcagtgcagctcaagattatattggtgaaaaatatggtaaagagtatattggaaaagtaaaagtaggaaagaaaaaagaaaatgttcaagacgctcacgaagggattcgtcctacgagtgcattaagaacgccggaaagtgtaaaagaatatttaaagccagaagagttaaaattgtattcattaatttacgctcgagcaatggcttcattgatggctccagcaaaatttgatgcaacttcagtatcattgatgaataatggttatgagtttaagactagtggttcagtaatcaaatttgatgggtacctaagagtttacggcgattatgaaaaacaaagtaatgaaattttgccggagcttaaagaaaaagaaatgttattaagtaaaaacattgaaaaaactcaacattttactaaaccaccagctcgttatagtgaagcaaaattaattaaagagatggaggaactgggaattggtcgtcctagtacttatgcaatgattattgatacaattcaaactcgtcaatatgttgaattggttgataaagctttcaaaccgacagaatctggaatcttgacaagtgatcgattaacagaatattttaatgatattatcaatgttgaatatacagcgaaaatggaacatgagcttgatgatattgctgaagggcaagatgaatatgctcacgctttacaaaagttcttagatttatttcaaccgttgcttgataatgcatatgataaaatggaagtgattgcaccgaagaaaactggagaaaaatgtcctgaatgtggacatgatctagttgaacgtaaaggacgttatggaacttttgttgcctgcgaaaattatccagaatgcaaatatgtaaaaaaagaccctgtagagattgaatatacgggtgaagaatgtcctaagtgtggaagtaagatgatttttaaaaatggtcgttttggacgttttgaagcatgttcaaattatcctgagtgtaagtatattaaaaacagcaagaaaaaagaacctgttatgacggatgaagagtgtccaaactgcggttctccgattgtaatcaaacaaggacgttggggtgagttcaaagcttgttcaaattacccgaaatgtaagacaatcataaagtagaacgaaagttctacttttgttttcaaaatagaaatgataaaattagaaaaggtgataaaatggaaaaaattgtaaatgtaattggagcaggtctggctggtgtggaagcctgtcatcaattagtaaaaagaggatataaagttcgactgtatgaaatgcgtcctaaaaagatgaccccagctcatcatagcggtaattttgcagaactggtttgctctaattcacttcgtgctgatgggactggaaatgcggtcggtgttttaaaggcagagatggaaatgatggatagtctcattattaaatatgctagaaaacatcaagtcccagcgggaggagcacttgcagttgaccgtaataatttttctcaagcgataacggagtacattcagagtcatcccttgattgaagtaattcatgaagaggcaaaagaatttcctgcaggttacacaattatcgcatctggtcctttgacaagtgatgctcttgcaacagcaattaaagaaaagttaggggaagattatttttatttttttgatgcagcagcaccaatcattgcaaaagaaagcattgattttgcaattgcgtattataaatctcgctacgataaaggggataatgaatatattaattgtcctatgaatgaagcacaattcaatgctttttatgatgccctagtcaatgcggaagttgttaaacctaaagattttgaagaaaaattttttgaaggctgtatgccttttgaagaaatggctcgccgtggaaaacaaacgttgttatttggaccgatgaaaccagttggacttactgcgccggatgggacgcgcccttatgctgttgtgcagttaagacaagacaatgtccaagcaagtttatataacattgttggttttcaaacacatctaacttggcctgaacaaaaaagaattattcaaatgattccaggacttgaaaatgcaagttttgttcgatatggagtaatgcatcgaaatagttttatttgttcaccaaaacatctattaaagacataccagttaaaaaattattctaatatatttatggcaggtcaaattactggagtagaaggatatgtagaatctgctcaaagtggtatggctgccggaataaacatggtccggttattagaagataaagagcctttgatttttccggagaatactgttatgggagcgttggctaattatataactaatgcctcgaaagaagattttcaaccaatgaaagctaattttggaattttgccagattttccaatacgaatcaagaaaaaagaacgtaaagctgcttatgcatcaagagcgttggaaacaatgaagggatttgttgatgaaaacaaccttggataactatttccgacaatatcttgattatttacaatatcagcgtcactatgctgataaaacaatagaatcgtataagcgtcagatcgatcatttcaaacaatttcttattgaagaatctattgatgattataatgatgtgagttatgcaatgctacgtggatatcttactaagctatatgaaaaaaatctttctaaaacaacaattaatcataaactcagtgcgttaagaagtttttttaactatttattaaaagaagagttaataaatgataatccttttttgctgattgaatcccaaaaagttgcaaagcgtaatccggattttctttttcctgaagaaatcctaggactattagatagtattgaaacaaaagatgatctgggaattcgtaataaagcgatgatggaattaatgtatgcatcaggcttgcggtgttcagaggttgtaaatttacaactttcaaatatagattttaatcaaatggtattatttattcatggaaaagggaataaagatcgttatgttccatttcatgattatgctggagaatggttgattaaatacatacaagaagctcgtgaaaatttaatgataaaaaatgaggggcataatttcgtctttgttaataaattcggtaatcctctaactaaccgaggagtagaaaacatagtagatcgaataatgcgactttatgattcaaccaaaaaaattcatcctcatacaattcgacattcctttgctacacatttattaaatgcaggagcagatattagaactgttcaggagttgttaggtcatgaaaacttatcaaccactcaaatttatacacatatttcaagagatcatttaaaagaggtatatttaaaagcacatccacgaaatattgaataattcaagttaaaatgatgaaaaatatgcttgtatgattgaaaaatctatgataaaatgtttcaggtatgaaaaatacacacattatgaattcatttatctagtgccgtaaggtgataaatgttcgaaataatggaggaaaaaacaaaaggaggaagttacaatgtcagtaatttcaatgaaaaaattattagaagtaggtgttcattttggacatcaaacaaaaagatggaatccaaaaatggctccatacattttcacatcaagaaacgggatttatattattgatttgcaaaaatcatctaaaaaaatcgatgatgcttataaagcaatgaatgaaatcgctgctaaaggtggaaaagtattatttgttggtactaaaaaacaagctcaagaagctgttaaagaagaagctattcgttcagaaagtttctatgttaactctcgttggttaggaggaactttaacaaacttcaaaacaattcaaaaaagaattagaagattaattgaattagaaaaaatggaagctgatggtacttttgatttattgcctaaaaaagaagtaatcttacttaaaaaagaagctgctaagttagaaaagaacttaggtggtatcaaagaaatgagaagattaccaaatgctttattcgtagtagatcctaaagctgaacataatgctgtagcagaagctaaaatcttaggtatccctgtattcggtatcgttgatactaactgtgatcctgatgaagttgattatgtaatcccagctaatgatgatgcaattagagcagtaaaattaattgttgctgcaatggctgatgcaatttgtgaagctaaaaatgaaccattaactgtagcatatgttaaagatgaagatgataaagaagtatctatgaacgatgcaatcacttcagttgaaaataatcaaagaagagcacctagaaataaaggtggaagacctaatcctagaagaaataatgctcctagaccaaataaagataacacagctggaactgaaggaaaataattctgtaaaataagggaaagcaaagcttttccctttttaataaaaaaaacaaataaaggagaaaattaaaatggcaattactgcaagtttagtaaaagaattacgtgaaaaaactggtgctggaatgatggattgtaaaaaagctttggaagcttgtgatggtgacatcgaaaaatcatttgactggttaagagaaaaaggaatcgcaaaagctgctaaaaaagctgatcgtatcgctgctgaaggtttaactgctttcgtattagatggggatactgctgcaattgttgaagttaactcagaaactgacttcgttgctaagaacgctgaattccaagggttagttaaaaatatcgctgaagttgttgctgctaataaacctgttgatttagaagctgcattaaacactgaagtagatggtaaaaaattagaaactgttatcgctgaagctagcggtaaaattggagaaaaattaagtttcagaagattcgaagttttaactaaaactgctgacgaagtatttggtgcttattctcatatgggtggaaaaatgactgcaattgttaaagttgctaattctactgaagataaggctcgtgacgtggctatgcatgttgctgcttctgatcctaaatatattgatagaactgcaattcctgctgaagttttagatcatgaattatctgtattaaaagctcaagcaatggaagaaaacgcagcagctgctaaacctaaaccagaaaatattattgaaaaaatggttgaaggtagattaaataaaaacttaaaagaaatgtgcttagttgatcaagaattcattaaaaatccggatgaaactgtagctaaattcttaggtgaaggcaaagtaatcaatatggttagattccaagttggtgaaggtatcgaaaagaaagaagaaaactttgctgaagaagttgctgctcaaatgaacgcaaaataataacttttaaaacactatcattagatagtgttttttctttggataagcgtcattcgactaggaatgtaccttgactaaacgacgaaaatatgataaattttttagaggaaaaagtaatcattattagctgataatgatgtgcgaatttaagcataaatctttttttataaaatataaataaggagattaatatgaagtataatcgggtattattgaaattaagtggtgaagcattggctggagatgataaaactggtatcaacgctcatacagtagcagatatcgctcgtcaaattaaagatgccaaagatttaggagttgagattgcaattgtttgtggcggcgggaacctatggcgtggtaaaactggtgctgatatgggaatggatcgttcaagtgctgactatatgggaatgctggctactgtaatgaatggtttagctgttcaaaatgcattggaggccattggcgttccaactcgtgttctttcagcgattgaaatgcgtcaagttgctgaaccatatattagaagacgagcaattcgtcacttagaaaaggggcgagtagtaatatttggagctggaacaggaagtcctttttttacaacagatacaacagctgctttgagagctgcagaaattaacgcagatgttatcctaatggctaaaaacggggtagacggagtttattcagctgatccaaaagttgatcctaatgcaattcgcttcgatactatttcgtattttgatgtattacaaaaagatttaaaaatcatggatcaaacagctatcactttatgtaaagacaataatattgatttatgtgtatttaatatgtctgtagacggaaacattgctaaagcatgtaatggcgatgatatcggaacaacaatctcaggaggaaaataaaatgataaatatgattttagatgatacaaatgaaagaatgacaaagacgattgaatctttccaacgtgatttatcatctgttagaactggtcgtgcaaatcctaatatgcttgatcgagtaatggttaactattatggttcaccaactccagtgaatcaaattgctggtatttcggtagtagaaggccgtcaattagttattaaaccttatgacaaatcaagtattaaagatattgaacatggcatttatgaagcggatttaggtcttactccacaaaacgatggtgagattattcgtattatggttcccgctttaactgaagaacgtcgtaaagagtttgctaaaaatgtttggaaatttgcggagaatgctaaggtgtcaattcgcaatattcgccgtgacagtaatgatgaaattaagaaaactgatggtagtgaagacgaaatcaaagctggtcaagaaagagttcaaaaattaacagataaatttgttaaagaaattgatgaaattgcaaaagtaaaagaaaaagatatcatgactgtataattagatgggcgttttaaacgcccattttatctaatttatttagaaagaagaaaatatatgcataaaagaccatgttcggattgaaatttagatagcgaaatatttcgtagctactattatttgaaagaagagcctgtggcattttgtcgagttaatggattacctatgagtggtggtaaagtggaaattacagagagaattggttattttttagatactggtaatatttcggatttgataagttcgaataaaagtaaatgtcaaataggaattataacagaagatagtaaaattgaagaaaattttgtttgttcacaaaaacatcgtgttttctttaaagaaaaaatagacaaaactttttcttttaacgtcccatttcaaaaatggttgaagacgaacactggtaaaatatatctgatgcaattaaagcatattatgagattttagaagcaaaaaagtcaacaaaaactgtaattgataaaaaatttgaatataatacatatattctgatttctttaaaaataacaaaggaaagacattagaacaggcaatcaggtgctggaattataaaaaagctgtaaagaccataatcgttatgaaggtgtatattttcttattttaatgtagtaaattaaataaataatttatatgtactaggatgattaagtctagcaatgttgcttaggcttttttttgtaatgaatttatggtataatctcgaatagttaaacaggaggacgacaaatgttttttaagaaaaagaagaatgaagaatttaattatcatgttcttgataaagataatattcctcaacatatagcttttattatggatggaaatggtcgttgggcaaaaaaaaggaagatgccacgcacttatggacatcatgaggggactaaaacaattcgagatgttgctttgcattgtaataagttaggagtcaaagctatgactgtatatgctttttcaaccgaaaattttgcacgaccagagcaagaggtacagtatatttttaaattaccaaaagatttctttgaattgtatatgaaagaactgatagaaaataatgtaaaaatctgtacaatcggacatttagaaatggctcctaaagaaactcaagatattattaactctgcaattgataagactaaaaataatactggtctaaaattatgctttgcttttatttatggtggacgtgatgaaattttagaagcaacaaaaaaactagcaatgaaagtaaaagctggtgaattaggtgtaaatgaaattaatgaaactgtctttaatgatgagttgatgactaaggatctaccggaagttgatttaatgattagaactagcggggaacaacgtttgtcgaatttcctgttatggcaattagcatatgcagaatttatttttacagatgttttatggcccgattttaatgaaaatgaacttgataaagcgatttggatgtaccaaaatcgtaatcgtcgttttggaggattaaaataatgaaagaaagaattattacggcaatctgtttgatgctggttgctgttccttgtgttatatttgggggatattattttaaaggcttgattggagtgattctagcattggcagtgtatgagatgttacatatatgcactcgtccaaaaataaaaatgtatttatatccaatcgtctgtggattttttatctatggttttttatttgaccaggatgatttatttttagcttcttatggaatcttaatctatttgattgtcttatttggagcaacaatttttgatgataccttgacaattgaacgcactagttatatttttacgatgggggtactaatatgtgctggtttacacgctttaatgtcacttcgtgatgtatatggttttcaatatattttattgcttgcgttagctacttacggtagtgatacaggcgcatattttgcaggagttttttttggtaaacacaagttgattcctcgattatctccaaagaaaacaatagaaggatcaatcggtggggtgctgcttgggactttactatcagttgggtatgctagttatttaggtttgttagaaaataatgtgattttaattgcagcatttttcgttttaactttcactagtcaaattggtgatctagtttttagtgctgtgaaacgtcattttggagtaaaagattactctaatttattacctggacatggtggcatattagatcgtattgatagtattttatttaatgcaatagtttttagtttctttttagtaatggtgaggttataaaatgaaaaaaattacagtattaggagttactggatcaattggaatgcagacagttgatgttgtaatgaatcatcctgaacagtttaagattacagcaatggcagcagggtataatgtggctaaggttgaggaaattttagcaatgattgatgttgagtatatctgtatggtaaaaaaagaagatgctttatatcttcaagaaaaatatcctgatcttaaagttgtttatggtgaaagtggattgatagaaattgcaactttaccagagattgagattgtattaaatgcaattgtcggatttgctggtttagtcccaacaattgaagcaattaaagcaaaaaaagatatagctttggcgaataaggaaactttagtcgtagcggggcatataattactgaactggtaaaagaatatggcgtcaaacttctaccggttgatagtgaacactctgctatttttcaatcattaaatggcgaagaacacaataaaattaagaagattattttaactgctagtggtggcagctttcgtgataagcaacgtgatgaattagcaggtgtaactgttaaagaagcattaaatcacccgaattggtcaatgggagctaaaattacaattgattctgcaactttatttaacaaagggttggaagtaatggaagcaaaatggttatttgacgtggattatgatcaaattgaagttttaattcatcctgaaagcatcattcattcgatggttgaatttgtggatacttcaattatcggacaattaggcaatccagatatgcggttaccaattcaatatgctttaacttatccagaacgtgattatttaattggtggtgaaagtcttgatttagcaaagattgcatcattaacatttaaaaagccagattttgaacgttttagagcattagctttagcttatcaagccggcaaaagtggtggaagtatgccgtgtgtgttaaatggtgcaaatgaacaagcaaatgagctatttagaaatggtaaaattgagtttcttgaaattgaaaatttagttgagaaagcattgaataaacatcagttagtcaaaaatccaacacttgaacagttgattgaaatcgatgcttgggctcgaaactttgttttaaaagagataggagaagattaatgcagacattaattaatattgtcgtttttattttgattcttggaatcgttgtgctgatccatgagttaggacattttattacggctaaatcgtttggggtttattgtagtgaattttcaattgggatgggaccaaagatattttcgcgcaaaaaaggtgagacagaatatgaaatcagagctttaccaattggtggttttgtatcaatggctggagaggctgataatgatattgaggaatttaaagatgttccaattgagcgtactttaaagggcattagctgctggaaaaagtgtgttgtttttttagccggagtctttatgaattttgttctatcattagtaattttaattggtgtttattgtgtaatagatgttcaaactaatacacctgaaatcgggaaagttacttcggacagtcccgcaatgattgcaggccttgaggcgggagatactatttctaaaattacttatgatggtcatgaaaatattattgcatcttttgcagacattcgtgaagtgttgaataatgataatcttaaatcaaaaagtgctacaataatgttgcaagttgaattggtccgtgatggtaaaacaattactaaagaagttaatgcaaaatataatagtgattctaattcatacacaatgggtttgactccagcaacaagaaatttaagcttttttgaagctattaattatggagtaactaaatttgtagagatggcgctgttgatttttacaacattaggtaagctatttacagactccgctaatacaattggacaattgtcaggaccagcgggaatttacaacgtaacggctcaaattactgaaacaggatcaattagtcaattattaacattgctagctttattatcgactaatattggaatgttcaatttattgcctattcctggtttagacggttgtcaagttatctttgctgtggttgaaagagtaatcgggcgtgaattaccgttaaaggttaaatatggtttacaaattgctggattagcccttgtttttggtctaatgatctttgtaacctttaatgatatttctagaatatttggataaagggaattaattttccctttttttatgctataatgtttgagtgttatattgataagaataatgaaggatgatttgatggaaaataaattattaatattattaaaaaatttaaagattgaaagccaagctaatattttaaaagaaggaaaaatcagtaaagttgttgtagcgagagataatagttatacttttcacttagtgtttaatcagattttgccatttgaggagtatcaattattaataaataaccgcgataattttccttatcctactaaatataaaattagttatgaaactgaattttttaatcaaaatgaattattattatataccggataccttttagaaaaattaaaaaaagattatcctgtttgtgctactttaacagttgaaagttttaaaatcgaagataaagttattagagtagaaacatgtaatgaaattcagttagaacaattacgtcagttaagagcacaaattgaagatatgttcaatgatgtaggtatcgataaaaattttgatttttatattgatgaagaaaacgatgtatttaaagatattaaagaagagatggaagcttatgaaccagttgaaattgacctttctttaatccaaaagccagataaaccggcgtcagaacaaaataattataagaataattatcgtcaaaaaaatgcagcaatcgatatgaaaattgaagagattactaatcagacaatggataataatattgtaataaaaggctttgtttttaaaacagaaatgattaaaacaagagcgggaaaacatattcaaagtttatgggttacagattatactgattcaattattgttaaacgttttgaaaacaattctaataactcgttagaagaattaaaagttatcggtaaaggcggagtttgggtaaaagttcgaggtgaagcccgttttgatagctttgcacgcgaaacagttatgatggctcgcgaggttgaagtgattaagagcccagcaccacgtaaagatactagtgaagcaaaaagagtggaattacatacacattcaaaaatgtcagcgatggatggggttggaacaattacccaatatattaacgctgtagcaagctggggacataaagcaattgctgtaactgatcatggtaatgtccaatcttttcctgaagctcaaatggcagctggaaaagcaggaattaaaatgatctatggtgttgaattcaatatgatcgaaccgattttgaatattgtttataacgaaatagatacctcaattgaacatgcaacctatgtttcttttgacttggaaacaacaggtctatcagttattcacgatgggattacagaatttggagctgtcaaaattaaaaatggagaagtaattgatcgactgcaaatgtttgtgaatccagggaagagcatttcctcaagaatcactaatttaactagcattactaatgatatggtacgtaatgaaccgacgattgatgcattattgcctagaattatagaattttttgatgattgtattttagtcgctcataatgctaattttgatattggatttttaaatgagaatttacggcgaaataatatgcctgaaattacgaacccaattatcgattcattggctttagcacgagcaattttgaaaccgatgaaatcgtatcgattggggaatgtgtgccgcagttatcgagtaaattatgatgatgaagtggctcaccgtgctgattatgatgctgaagtattaggtgatgtttttaacatgatgttacatcaaattatgcaaagcggtaaatataatcttttagacttgtgtgaattaacaggggatgatgtttataaaattgtttatccttatcatatgaccgcattggcgttaaataaagctggtttaaaaaatatgtttaaattggttagtgaagcaaatactaaatattttcataatggatcaagaattcctaaagaacgtttagaacattatcgagaaggcttattatatggcagcagttgctataacggtgatgtttttgaggcggctctgaacttatctgatgaaaaattagaacgggccatggaattttatgactatattgaaattcaaccacttgaggactactatcacttagttgatcgtggaaaattgcaagatactgatgagttaatcaaatctttacatcggattattgattgtgcaaaaaaactagataaattaattgtagcaactggtgatgttcactttttagaagttcgtgataaaatttttagagatgtttttatctctaatccgacgattggaattggtcaccgtgctcatccgctgtgtgatcgacgcaatcctaaggctaaaaatccctgccaatatttgagaacaactaatgaaatgttagaaggttatccttatttaccacaagacgaagtatttgaatatgttgttacaaatacaaataaaattgctgatatggttgaggaaatcaaaccagtgcatgataaattgttcacgcctaagatagatggtgcagacgaaaatctaaagaagatttgttacgatactgcgcataagacatatggtaatccgttaccgcaaattgttgaaaagcgccttgaaaaagaacttagtaatatcatcaagcatggctttggggtcatttactatatttctcatctattagtaaaaaaatcaaatgatgatggctatctagtaggttctcggggatctgttggttcttcatttgttgcaacaatgtcaggaataacagaggtaaatccgttaccgcctcactatgtatgcctccattgttcgcatagcgaatttttagaagaaggaattgtggctgatggctatgatttggaagataaagtgtgccctaaatgcggtaaaataatgaagggtgaaggacataatattccatttgagaccttccttggatttaacgctgataaagtaccggacattgatttaaatttctcaggtgaatatcaagctaatgcacatgcttttactaaagaaatatttggtgaagatcatgtttttagagcaggaacgatttcgacagtagcagaaaaaacagcttatggatatgcaaaaggatatgctgaattaatggggactgatcaaacaattcgttctgctgaattagagcgaatcgcagccggctgtggaggtgttaaaagaacaacaggacagcatcctggtgggatcatcgttattccaggggatatggatgtatttgattttacaccgtatcaatttccggcagatgatctaaatgctgcgtggaaaacaactcacttcgatttccatgctattcatgataatgttttgaaatttgatattttaggccatgtcgatccgactgtaacacgatttttgcaagatctgacaggtgttgatcctaaggatattccaactaacgataaaaaagttatgagtttgtttactagcagtgaggcattaggatgtaatcttgattttattggttgcaaaaatggagctttagggcttcctgaatttggtacctcatttgtacgtggaatgttagatcaaacccaacctaaaacatttaatgatttagttattatctcggggctatcacatggaactgatgtatatttaggaaatgctgaaacgttaattaaatctgggacatgtacactttctgaagtaattggatgtcgtgatgatattatggtttatttgattgaaaaaggtttgccaaacaaggatgctttcgatatcatggaatgtgtccgtaaaggtaagtcaccggtagttttcccagaaaaaaaatatgaagaactaatgaaagaatacaatgtaccgcagtggtatattgactcttgtaaaaaaattaaatacatgttccctaaggctcatgctgctgcctatgtattatctgcaattcgagtagcttggtggaaattatattatccacgagaatattatgctgtttattttacaacgagatgtgatttttatgatattgaaacacttgtacaaggtaaagatgctatcatggcaagacgagctgaaataacgcagttaagagctgaacggagttcttcaaacaaagatgaaggattatgggatatttttgaaatcgcactagaaatgattgagcggggattccattttaatccagttagtttagagtattcacaagctagcaagtttatattagatccaaacgatgaaaaagggttgattccaccgtttagtgcaattgatgcattaggtgaatcagtagctaaaacagttgttgatgctcgagcagatggtccgtttttatctaaagaagatgttattaaacgaacaaagttgaacaattcacatattaaaacactatctaaaatgggggtttttaatggaatgcaggagcgtaatcaactttcacttttctaagtagttgcaataattaaaaaaatgtggtattatttatttagtttcatagagaagcgagtggggtgacccactctttattattgaatagaggtgaaagaatggaacttttagatacgattaaaacactgataaaaccaattttagaaaataatgatgtatatcttgatgatattgaataccttcaggaaaatggcgaatggtatcttcgcatttttgttgaaaaaaatgaaggttccctagacatggacacatgtgtagcagttagtgaagcaattagtttaaagatggatgaagaagatccgatcaaaggagaatattatttagaagtttcttcaccaggtgtagaaaagcccctaaagacttttgagcaagttaaagcttcagtaggtaagtatgtctacgctaaattcattaatccaactgctggaatggatgaagtggaaggatttattaaaacaattgaagatgaaacgattgaatttgaatatttagttaagaatattaagaaaagaattaaaattgactatagcaatattaaatttataagactagctgtgaaattttaggaggataaaaaagtggcaagtaaaaaattcatggatgcactaaatttattaattgaagaaaaagggattgaaaaagatgtctttttagaaatgcttaaagaatctattggtaaagcatataagaaaaattatttaaaccctgatgctaatgtccgtgttgaaattaatgaaaaaactggaaagtttagattatttgaacttcgaacagttgttgatgatctagatgatgaagatattgaattatctctagaagaagctcaagcaatcaatcctaattatcaaattggagatgttgttgaaaccgaagccgatatcgaacatattggacgtttggcagctattcaaacaaaacaattatttagacaaaagattcgcgaaactgaaaaagaaacactttataacgaatttgcagataaaaaagatgatatcatcacaggtatcgttgatcgtgttgaggataaatttgcaattgtaaatattggtaaaacaggagctttcttagcttctaatcaacaaattcctggtgaaaaattaaatgagggtcaacatttaaaagtgtatgttagcgatgttgatcgtggaactaaaggaactcatattgttgttagccggacagagccaagttttgttaagagattatttgaattagaagtacctgaagtatacgatggaacagttgaaatcaaagcagtttcacgggaaccaggtgaaagaagtaaggttgctgtttatactagtaatgaaaatattgatccaattggctcttgtgttggaccaaagggaagtcgagttaaaaatgtagttgatgagttaaatggtgagatgattgatattattttatggaatagtgatccggttgtctttatttctaatgccttgagtccatctgatgttaagtgggtatctattaatgaagaaaatcacagtgctttagtagttgtaccagatgatcaattatctttagctatcggtaagcgtggtcaaaacgctcgtttagcagtacgtttaacaggttggaagattgatattaaatctgttagtgaggctgttgaacttggtttaattgatcttcaaacagttaataatacagaagaatcatcacctgttgatgctagttttgaagaagagtttgctcaagaaatgttagatgaagcagttgaggaagctgttgtggaagaagctgttgaagttgcagaagaaccagaaatcgaagaagaagttgttgaggttgaagaagaacctactcaatcgaaaaaggttattgaatacgaagattttgaagatttagatgatgaatatagtaaatatgatgaagaaatcgattacgatgaatatgatgaatactatgataaagattaaggagtgattaaattgcgaaaaatccctttaagaaaatgtttggcaacgggtgaacagttgccaaaacaacaattaatcagaatcgtacgtaataaagaaggtcaagtagctgtcgatccaactggtaagatgaatggacgaggagcttatctgaaacgtagtcatgaagcgttcgtgttagcaaaaaagaaaaaagttttagctcgggctttgcaggttgaaattcctgaagaaattttcgtagaactggaaaaatttgcggatgaataattatttaaatacacttggcctggctgcgcgagctcgaaaaatcgttactggtgaaactttaatcacaaagattagaagtaacgaagtagaatttgttattattgctagcgacgctagtgacaatactaaaaaaaagatcaccgataaatgtacaagttataaagttgagtatgttatagcttgtactattgatgaactatccagtgcaatcggtaaaaaaaatcgagtagcacttggtatccaggatactggatttgctaaaatattaaaagaaaagataggagggtgaacatatggcaaaacaaaataaacaaacaaaaaataaaaaaggtgcgccaagaaagaaacaattaaagtctaattttccgaccaaaaaagaagaaatagttgctaaagatggtgtcattgtttatgaagaaggtattactgttggtcaattagctgataaaattggacaaacgcctgccaatgttattaaagtattgtttctattaggaacgatggtaactattaattcatctttaaatgatgagcaagtagaattaatttgtcttgaatatggttttgaagtcgaaaaacatgttgaagttagtgaagtgaattttgaggaaattgatattcaggatgatgagaaggatttacagcctcgttgtccagtagttacaattatgggacatgttgatcatggtaaaactacattgttagatacaatcagaaagtctgcggttgtagaaggtgaatttggtgggattacacaacatatcggtgcttatcaagttgaagttaatggaaaaaaagttactttcttagatacaccgggccatgaagcatttactgctatgcgtgctcgtggagctcaagtaactgatattgttattattgtagtagcagctgatgatggtgttatgccacaaacaaaagaggcaattgatcatgcaaaagcagcaggtgtaccaattgtcgttgcgattaataaaattgataaagaaggtgccgatcctgaaagaatcaaaggagaaatggctgagcatggtctgcttcctgaagattggggtggagatacagtatactgtgaaatttctgctaaaaaaagaattggaattgaagaattgctagaaactttaactgttgttgcagaattagcagatttaaaagcaaatcctaatcgttatgcatatggcagtgtagttgaaggtaaactagataaggggcgtggaccagttgcaacgttacttgttgaaaatggtactttaagagcgggagatccaattgtagttggaacatcatttggacgtgttcgtcaaatgcttgatgatcgtggaaaaattattaaagaagcacttcccgctactccagttgaaattacgggtttaaatgacgttccagtcgctggtgataagtttatggcttttgaaaacgaaaaacaagctcgtagtgttggtgaaacacgattaaaagcgaaacaagataaagagcgtagttcaggagctgccttatcattagatgatttatactctcaaatcaaagagggcgaaatgattgacttaaacattattgttaaagctgatgtccaaggtactgctgaagcagttaaagcttcattagaaaaaattgatgttgatggtgtaagagtaaatgttattcgttctacagctggaggaatttcagaatctgatgttctattagcatctgcttcacaagcaattatttatggttttaatgttcgtccaaatgcaaaagtacgtcaaaaggctgaagaagaaggaattgagattcgtttacacaatatcatctataaaatggttgaagagattgaaaccgcgatgaaaggtatgcttgctccagaaattaaagaggttgttacaggtcaagcagaaattcgtcaggtaattaaagtttctaaagttggaaatattgctggatgttatgtaacagatggttttattcgccgtaattgtggaatccgtttacttcgtgatagtgttgttgtatatgaaggaaaattaggttcattaaaacgtttccaggatgatgctaaagaagttgcagcgggatttgaatgtggtttaagtattgaaaacttcaatgatattaaagaaggcgatattgtcgaaggatatatcatggaagaagtcgaagttaagtaggtgaattaaatgattcttaaaaaggataagatgaatggtattattcaacgcgagttatcacaaatcattcaagttgaagtacgtgatcctaagataggtttttgtactattactgcagttgatacgactactgatctatcaattgctaaagtatatgtgactttcttaggaaaagactttgatacgcgcaaaggaatggaagcattaaatcgttctaaaggatttattcgttctttattagctaaacgtcttacaattcgtaaagtaccagaactgatttttgttaacgatacctctttagagtatggtaataaaatcgaaaaaattattgatgatttaaatcatcatgataaataattcaaaagaaggtcaaattgaagtgaagccaatttcttggacactaatttagttatgctattaataaggattgatcctgtattgcacaggagttgatccttttaattttgttgttattttttgagtatagtattgttttatacattcttctattgcaatctttaaattatataacgatctaaaaatatattcataaccataaaaaatttcatttttccaacggaattcttcattggtgaattatctaaacaatttcttttttaatactgactgtggaatttattcttttcaaaaattttttatacacaatatttttttgttatcttgtgagtttaaccataataaaatgaactccaccatttgaaatacctaaataatgggactacaataaatcaccttctttttatttgagtcttatttgtttcatctagatagaattgtgctataatactatatagatataggaggactaaaagaaatgaaatactgtataacaaacgggaaagttattttaaaaaatcaagtagtagatgcaaatgtatatgtagaaaatacaaagattactgagatttctaatcgtcaacctgatgatgaaacagtaattgatgcaaaaggtagatatgtgtcaccaggatttattgatgttcatactcatgggcgtggtggcagtgatacaatgtataacacttttgaagatcttgatacaattacaagtactgccgtaaaaacaggtgtaacaggaattttacctacaacgatgacgatgtctaaagaagatacttatgcggctattaaaaatgttggagataacatggataaagttggaggaagtaaaatcctaggagtacacatggaaggtccattttttaatacaaaatataaaggagctcaacctgaagagtttatgatcaaacctacagctgaaaattatagcagtttagttggtgaatatggtaaaattgtaaaaaaattaagtttagcaccagaattaaaggattctgataagttaatcgagtatttagtcaaagaaggtgtggttgtaagtattgggcacactaatgcaacttatgacgaagcagttgttggaattaaagctggagcaacttcaggtactcatacttataatgcaatgacaccattaacacatcgaaatccaggagtagtaggagctatcatggaacatgatgaagtttatgcggaattgattttagatggaattcatgtcagctatccagctgcaaaagtgcttttaagggctaaaggtttagataaagtgattttaatcactgattctattgaagcttctggtttagaagatggtcaatataaattaggtaatcaagctgtatttgttaaagataattcagctcgtttagaagatgggactttagctggtagtattttagcaatgaataatgcagtaaagaatgcatatcaacatttaggtttatcaattaatgaagctgttaatttagctagttataatcctgctaaaaatttgaatttaattaatttaggggaaattgcagttaacaaaacagcggacattattatgtttgatgaagaaattaatgttgattttgtaatgattgatggaaatgtaaaaattggaggatagtatgattacattaaagaatgaagttttagaggttactctagctaataaaggtgcagaaattattaaaattgttgggcaggatgatcaaattaattatatgtggcgtcgtgatccaattcaatgggcgaatagtgctccaatcctatttcctattgtaggtgcgctacaaaataatgagtgtcgaattgatggtaaaacttatactatgactcaacatggtttttcacgtcatagtgaatatgaggctaatcaaattaatgatcaagaagtagtttttacacttatttcaaatgaggaaatagctaaacaatatccatatttatttaagttagatgtaacttataaattggataagaatgtacttagctgtaattgtaaagttactaataccgatagtcagactatttatttccaaattggtggtcatcctgcatttgcttgtccttttatggaaaatgaatcaagtaatgattactatttagaatttagtgagaatgagactgttaatcaaaaaattattgatgttgaacataaaggaatgtcagatataacattaccgtttttagataacgaaaagagattttttgttcgtcagcaattatttgataatgatgcaattgttttaaaggacgtgaaatcaaaaacattatcattgaagtcattaaatcacaataaatctttagtattccatatggaaggttttaatcacttaggtatttgggcagctaaacatgtgggtggactaattgccattgaaccttgggtaggtcatagtgattatgttggtttcactggggaatttaaggataaagagagtgtagttagtctaaatcctagtgagatttttgaatgtacttttaaagttgaaatcaaccaataatgacaaaaaaggaataagataaattttataattatcttatgaaagtaaaaattattgaaaaaacacacgagttagatttagaagatgaaattaatgattttttggaaaagaaaaatcctaaaattttatcgctgcattatcaagtggcaatgactttttcaagtgaattagaatatagttttagctgtttgattgagtacgaggataaataatcatatttatccttttcttttcgcatacttttagtattttagttaaaactatttatggaggtgattccatggctaaaggtgtatgttgtcacgttgatacttgtgtttacaatcatgattgtaattgtgaggcaaaagaaattacagtttgtaattgtaaatgtcacgaagcgaaagatattcaagaaacagcttgtgaaacttttaaatgtaaatagaaagtttaatatgacatcacaaaaggtaagaagtaacttttgtgatgtcttttgttataagtatgagctttacaaaaagacatttatatgttttattttttgtatacatataaaaacgtgatataataaaaaaggtgataaaaatgaaaaaaattgctttgattctaatttgttgcctagttttaatagggtgcaaaaataaagacaataacgataataaattttatcgacaatataaagaatatgaaaataaaatagataatcataatgaatttttgaatgctacaaatgaatttaatatacgtttagtagtcaataaagttgaagataaaaaatatcggtatgatgttattattgacacaccgacaataaatatgtatcatttacaagcaatagcaaaagttgctggtgatgataatgaaagtctaccaaccttaggaattcttgaggaagatattttttcattagttcctgaagtagtagataaagccaatggaatttataagggtgtaaatctatctggtattactagtaaaagtgaatttagtgtattggtttatttgactttttcaacagataaacaatctaataacaaagaagaaaggtatattaaactatatggtaatgcgacttgataaattgcttgcaaactatgggattggtactagaaaagaagtaaaatcactgattcgaaaaggttttgtaaaagtaaatggaatgattataaagaaagatgattttaaagttgatcatgaaattgatgaaatagtatttgatgatgagttgattgaataccggccatatgtctatataatgctgaataagccagcgggatatattagtgcaactaaagacaatcttcatcctacagtattagaactgattgagggctatgaaaattatgatttatttcctgtcggccgcttggatttagatacagaaggactattgttaattactaatgatggtgattttagtcataaattattagcccctagtcgaaatcattcaaaaatatattttgcaaatattgcgggagttatggatgaacaagatattcaggcatttaaagatgggattattttaaatactggctatcactgtaaacctgccaacctagaaattattaataaaaacaatgatagttgtgatgttagaattgaaatatttgaaggaaagtttcatcaagtaaaaaagatggttgaggtttgtggtaaagaggtaatatatttaaaacgcttatcgatccgcaatcttgaactggataggagtttagcattgggtgattttcgagaattatctaatgaggaattagtcgacttgatggaggatttatgatagaatatttttatatgtaaaggggagtaataatgcgtttaagaaataatccaaaagcatatgatattatgaaagaaaataaatcttttgtaatattggagccggaaaattgtaaaaataaatggaaagatatttttggaaataatcatccaatatatattgaaatcgggatgggtaaaggtgattttatttatgaaaatgctcgtcaatttccagaaataaattttgttggtattgaaaaatacccaagtgttttagcagcagcaataaataagataaatgctcgtgaagaaaaagtaaataatttgcgtttaatgcattacgatgcaattgaattgcatcaagtatttgaaaaagatgaagttgataaaatattcttgaattttagtgatccttggcctaaaagtaagcatgctaaaagacgacttacatcaagtaaatttttagatgtatacaaggatattttaatagatgaaggaaatattgaatttaaaagtgataatcgtggactgttcgaatattcgattatttctttaaaccaatatccaatggatatagagtacattagtttagatttgcataacagtcctgaaagtgaaatcaatattatgactgagtatgagcggaaattttgtgagaaagggccaatttataaattggtagcaaggtatcgtaaaaatggataaattagtagaaattaaaacaatcgaagaatttgacaatattcgtgtaggtaaaacgattataatgtttacagcagactggtgtcctgactgtatgtttgtaaaaccgttcattggcgatattgttgatgccaatcctgaatacaagttttatatgattaatcgtgacaatatgattgatttgtgtaaggatctggatattttaggtattccttcttttgtagcttataacgataaagaagaaagtggacgctttgtaagtaagttacgtaagactaaagaagaaatacaggcgtttattgatacgttaaaataagaggtgtaggaatgatatttcatggattttataatttaaaacatgttggtgatattttattagcacgatgtggagaaggtaggacctttgattatgataaatatgatgatttagttgtattgaaagatagtaaaaataggatacttggttttaatttgttgaatgctagtaattatttgggagaattaaatactggactagttaatttttcagataatcaaattgaaaaatttaatgaacttttaacaactcacggacttgatccggttgtcttagacaaagaacctcgttttattgttggtgaggtaactgcaatggaagaacatccagattctgaccacttacatatttgtcaggttgatttaaagaatactactacacaaattgtatgtggtgcccctaatgttgaagttgggcaaagagtggtagtagctactattggcgcagttatgcctagtggattggttattaaaccttcaaaactacgtaaaattgattctaacgggatgatttgttcagcaagagagttaggactgcctaatgctccccaaattagaggtatattagttttagataaagataaatatagtattggagattcatttttctagaaaagggggaaacagtgatgtttagaggcttatttaaaaagcatgaagaagatgaagatatttttgaagtggatcctgtcgttgaacagcgacgtaaggaaaaatttagcacgccattaatatatgatgaagaatttaaagaggagccagaagtgactgtaacgcctaccccaaagactaaagaaaaaactaaggttgttgaggcaaagcctaaggtagaagaaaaacctcgtcaaatttaccaaatgagtgaagttatttcaccaatgatgggaattacaaaaggaaaaaatgataaaaaagctgtaaagccaacaacttcttcaaaacctaaaaaacgtaaaaatgttgatcaattagttcctgtaattagtcctttttttggaaattatgaggaaaaggagcaagttgaatcagaagcaaaactgacaactattaatgatgaacctaaagaaaaaaaagttattgaagatttgcctacagtagaagataatttacgtaatatagctaaaattgtggaagaagaacaggatcagcttaaaattattgaggagcgaactggtgagttcaaattagattttggtactaacgatgttgaaaaacaaaactctttgattgatgaaattgatgatgatatgtcattggatgaattaatgagtttgtatgaaaagaagtttaaagactaacaatgataagtggtattggttgtgatattgttgatctaaatcggctgaatttagataatgaatgttttgttttaaaactattaacaaaaaatgaatttttaatttttaaaaataaaaattctttaaaacaaaaaaaagaatttttgggtggacgttttgctgccaaagaagctttttttaaggctcatgggattgaacacggcatgctgtcttttcatgatattgagatattaaatgataaaaacggcaagccaaaaattaattatcctaatacttttatttcaatcgctcatgaaaatgattatgcaattgcatatgttgttgtagaagaaggctaaattgccttctttttcagtatatattggtaaatttattagataattatagattagagcaataataagatatttgtaaaattagttttgaagattttataaaattattatatagttggtatatgattcttttatgagttacttgtaattgggcaataattatatacaagatacaataaaaatattgcaatattaaacgaggtatatttttattttcaacagttgttataatttcattttttggtataataacatacgtaaaatttcaagtttgtgataggaagcgaaaatcatgtatgaagataaagttaagaaaagtcttagaaaaataattatttttgcagtcattattgggatatttttagcatcaattggagctgggtttttctatgtgataagaacagcttttgatcgttcaactgatgaaagaatgattgaagaaacagataattataaaaagagattagataaacaaattaataataattttcaaatgttaaataccgtcgcaagcattattggaaattctaatttggatgagtctgctgattttgattccattttggaaagggcatatattgaaaatgatttcttgacagttgcttttttttacaatgatgaaatgggaacactatctacaggtgatcatattatttctagtgatattcatttatcgtcgctacagcctgaagtacaagaagttgttcgtaaagctttgcggggaaaggaaaatgtttcagaaccattctatggtgatttttccgaagaagaggtttttacttttggcgttccagtatatcgaaataaacaaattgttggagctatgattgctagtagtgttgttgatgtattttcagaaattatagatggcgaaaaggtcttaaatgggagtgcttatatccatttattggatgtgaatgggaaatttttgattcgttcttcacatgcagttgttaaagaaaaaaagactgatatatttaaagaaccgtatttgtctggagatgaattaacaaaaattaaaaaaagtatgaaaaattctgaaatagtccgttttacatttacctatgaaggaaaagagtatcattcaattttagaaccgcttgatgttaatgaatggtatttgttttgtattaactctgttcaaaatagtaatagtgggatttactcggttgcttatgcagtagcttgtttctttgtcattatagtgttactagtaggctatcttttaatttatggttatcggacaatgaaaaagaataaccagcaattaatggattttgcatatttagatcgtctaacaggaatttataatttaaatcgttttggggaattggcacaccagcatattgaagaacattctaaatatgcaattgctgcactaaatgtacgtaaatttaaatttataaatgagatttttggaaaagaacaagcagataggttactgtgctacattggaagaattttaaatgataatatcaaagatggtgaacttgtctgtcgtgatagtgctgatgttttttatatgtttttattagagactgaaaaaaacattcttgaagttcgtcttaaagaaattttagaaaaaatcagaacatcatcgaatgattctaatagtaattatagaattactatgagttgtggtattgcaacagctacagacaagcaggaactacaagtgtcaatgacacatgcaatgtttgccttagaaatatcgaaaaataattttaaaataccgctgtggtttttcgatgcggctttacatgagcaagaaaaaatgaatgactatatcgaaaggcatatgtacgaagccatagaaaacggtgagtttaaattgtatttacagccaaaaatagatttaaaaactaattctcttgccagtgctgaagccttggtacgttggataagaaacgatgggactacaatttttccctcacaatttatcccaatttttgaacagaatggattttgtgttaatttagatatgtatatggttgaaaaggtttgccaattgcttcgccaatggattgacgaaggatatcaagctattccgattgcaattaatcaatcaaaattagtactttatgaaattggatacgtaaagaatctttgtggaatattagatagatataatattccagcatcattaattactttagaaattctggaagaaattgcaatcgaaaatgtagatgacttaaataaaaaattaacagaattaagagatattggttttaaaatatctatggatgactttggaacaggatattcttcattaaatactttaggaaaattaaatattgatgaattaaaactggatcgtagctttttagttgagataaaggatactagaaatcaaaatgcacgtttaataatggaggaaattgttcaactatctaagaaactttctatcttttctgttattgaaggagtagaaacaagtgaagatgatttattggttaaagaaattggttgtgattatggacagggatactattatagtcgtcctattgattcaaatgattttacaagcaagatgctaaataagtttaataaataattttaattgggagaattttaatggaaaatttattaatagataatatgctggaaaatgctaaaattggaatttgggttattgaattgtctcataataaaaagaatgaccctaaaatgtttggtaatactcatatgaaattactgttaggagtagcggattcttattcgccggaggaagtttatcaattttgggtagaacgaatacatccagcttatgtttcttatgtagaggaagcagttgaacgtttaataagtgggaataaggcagaagtcgaatatccttggaaacatcctgaaaatggctggatgtatatacgatgtggcgggtatctcaatactaattttacacaatgttatcgattggaagggtatcatcaagatattagtaatttaattttccgtttcgaaccattctcatttgattatcaaattcaagatcaacttttatttaaagaatattcacgctattatatggatatatacgatgaattatgtgaaattgatccggttacgaatacgatggagattgtttttcaacgaaaagataaatatttatccatattttcgggaattaatttttttgaatttataaaaaaatatatttattctatggatcatcttatcatttgtgaaacttataatgaattatcttcagcaaaaaaacaaaaagtgacgattgatgttcgtattcataatagtaatgatgggtattcatggatacggcttgtttttgtactagcacaaatgaactatagtcctaaagttttaatgggaattatggacattcaagaacaaaaacgaaatatggagttttttattgatagtgatgcaatactctcaacgattatcgaggaaaatgcttatatttttgatatagatataatgacacaaaacatatctgctattaaaggtgaaaatttatcaattcatgatatgtcttataacaaatttttacctttatttatgcagagatgcagtgatatttctgaattagaatatcttaatagttttttatcatttaaccatttaaaagaacttgtttttcaaaaaaagaatgcacatatcgatatccgtgaaaaaacagagcattttctttatggctggtatcggatccatttaatggttcctaaagcattagaagaccgtattttaattctaattaaaaaaatcgataaagacgatgtatttcaaacggtaattacaaaatatgtacaaaagaattttgaatcgctctgttatattgattgtgatagtggcaaatatttacaatttgttactgaaggaatgaaggaactaatttttaatgaaaatgaatttgattataaagatgccttagatacatttattgaaagtcaggtggttatagaagatcgcaaagtagctcaaactaaaatgaatctcgattatatttttttaactttgcaaaaagatggcgactatttttgtaatatacgaattttggatagttgtggagaatttcaccaaaaaacaatacactattatatttatgatgaagatacaaaaatcatattaatgatggttgcagataccacagaacaatatttattaaatcaaagtgaaaaagagcaaatagaaagattaaagctaaaagcaaatacagatgagttaactggactatataatcgatattattgtaaaacacatattaatgaatatttacaagaagtacctcaaggacagcaggcggtttttttattaattgatctagataattttaaaaatcttaacgattctttaggacatttagctggtgatcaagcattagttgatgtagcaaatgttttgaaaaattcattttgtgatgatgctattatttcacgttttggaggagatgaatttgtggtttttgtaaaaaacattcaagacatcaagctttttaatcgtttaatatccagacttcttcaacaattagatttgtattatcaaagtgaaaaggatcagataaacatccaagcttctattggaatagcactagcacctattgatggtagagatatgaatactttatatttaaaagcagataaagcgttgtatcaagcaaaagaaggcggaaaaaatagatacaagtattacaataattagttttgtttagataagatgttaactaaatatttagcccaatttaatattaattgaactctagcaaaataaattggaattctaaagataaagtatgtacaagcaagatgagttaaggtactataatggagcataatcaaaaatatatttatttctgtgtttaagaaagtataagaaaatatcttttttatattgtcctcattatgatggggtgggaataataaaaaatgaatcttaatttgggaatattaaactctatttttatagagttttttttgttattggaggtattgaaaaatattatataaaaataaatatagtagttattttgagcgaaacagggataagatggactttttttgcaaaatatgtatatttttttcgacaattttttatagactgatatagtctatttaagcatatctgttaacttttgctacacatctgaaagaaaaagtttcaccagtgacccattttgacaatgtcgttaattatggttaattttacagtgttgtaatctttttataattatgcctataattttgtcataaaggaggggtaaataatgttaaatactgtagcattagtagggagattagtagatatcccggaaatgaaaacaacgattggaggtgtaaaagtagcaaatgcaactattcaaatcgaacaaggttttaaaaatagccttggtgcatttgaaaatgattacattgttgtaagtttatggcgcggtatcgctgaaatgattattgattgtgcaagaccaggatgcatgattgcagttaaaggaagactgcattcgagaacattagaatgtgccgagtcaaaacaaattacttcaattgaagtaattgcagaacgagtttctttattagataaatatttcaaaaactatgattaaatatcatttgagtttaaccggcttatttgttataatgatttaacgaaagtgggtgaaaaaatgactattgatcaaagtaaaattagaaatttttcaattatcgcacatatcgatcatggtaaaagcaccctagcagatcgaattttgcaaataactggagctgtcgcagatcgtgaaatgaaggcacagttactcgatagtatggatttagagcgagaaagaggaattaccatcaaattaaacgcagttcaactgaattatactgctaaagatggtcaaacatatttgttacatttaattgatacaccaggtcatgtcgactttacttatgaggtatcgagatcgttggctgcttgtgaaggtgcaatattagttgttgattcagtgcagggagttgaagcacaaacgttggcaaatgtgtatttggctctagataataatttagaaatattgccagttattaataaaatcgatttgccaagtgctgacccgcaacgagttatacgtgaagttgaagaagttattggtttgccggcagatcatgcaccgttgatttcagcaaagagcggtttaaatgttgaagaagttcttgaaaaagttgtacaggaatttcctgctcctagtggagatgtgaataatccaacacaagctttgatttttgattcttattatgatagttatcgcggagtaattgtatttgttagggttaaagaaggaactattaacgttggagatcatgtgaagtttatggcaacaggagcaacatatgaagtaactgaattaggtgtaagaactcctcgtgaagtaaaaaaagaacagttagtggtaggtgaagtaggctggtttgccgcttcaataaaatccatccaggatattcatgtgggggatactgtaactacagttgaaaatgagtctaatattcaattacccggataccgccaattaaatccgatggtatattgtggtttatatcctgttgataacgctcgttataaagatttacgggaagcgttagaaaaaatgaaattaagtgattcatcattaatgtttgatccagaaacctcacaagcattaggatttggatttagatgtggttttttaggcttgttgcatatggatgttattcaagaacgtttagaaagagaatttgatcttgatttaattgcaacggcaccatcagttatttatcattgctatttgacagatcgtagtgaagtaatcgttgataatccagcgatgatgcctgagccgcaagtaattgatcatattgaagaaccttatgttaaagcttctattatgactccaaacgaatacgtaggggttatcatggaattatgtcaatctaaacgtggagaatatcaggatattgaatatattgatgatactcgacgtaatgtaatttatgaaattcctttatctgaaattgtatatgatttttttgacaaattaaaatcaggtactaaaggctatgcatctcttgattatgaattgattggctatcgtactagcaaacttcaaaaaatggatattttattgaacggagaagtcgttgatgcactttcaacaattgtgcataaggattttgcatatggacgaggaaaaattatctgtgaaaaattaaaagaaattattccaaaacaaatgtttgaagtgccaattcaagcagcactacaagggaaaataattgcccgtactacaattaaggcgatgcgtaaaaatgtattggcaaaatgttatggcggcgatatttctcgtaaaaagaaattactagagaaacaaaaagaaggtaaaaaacgaatgaaggcagttggaaatgttgaaattccacaagaggcattcatggcgatattatctgttgacgatgagtaggataaattatctatcctacttatttttttgttgtaaatagtcttgatagccattacaatataaatatatacgaataaaggagaatgaaaatgacaatcaaattaccagacaattttttctttggggcggctttatctggtccgcaaactgaaggtgcttataacgttggtggtcgcctaagatcatactgggacatgtggtctgaccaggaaatcaatgcttttcataacaatgttggctcatatgtcggaaatgatatgtatcaccgttatgaagaagacatcaaactgttcaaatcaatgaactttaaatcttttagaacatcaatgcagtggactagactgcttgatcaggatggaaatattaatccagaaggagctgcatggtatcataaactgatcgattgtgccaatgaaaacggaatcgatatctttatgaacatgtatcatttcgatatgcctgaatatttatataaacgtggtggttgggctaaccgtgaagttgttgaagcttatgcaaattttgttaaaaaggcaatggaggaatttggtggcaaagttaaatattggtttacattcaatgagccaatcgttgaaccagaacagcaatatttgcatggggtttggtttccctatgaaaagaacattaaacgttcattggatgtccaatataatatcacattagcacactgtctagcagtaatgaactttagagaactgcaggctgaagggaaaatggttgaaggagcgaagatagggatgatcaactgctttgcaccaccatatacaaaagaaaatccaagtccagaggatctggaagcagtaagaatgacagacgggttgcataaccgctggtggttagatgtagtagcacacggacatctgccaaaggatgtaattgatacagtagaaaatgaatggaagatcaaaatgaatcgtcgccctggagatgaagcaatcttagctggaggaaaagtagattggttgggatttaattattaccagccgacaagaattcaggcgccagatcagaaatttgatgaaaatggattgccatgtatagcgaaaccatatatctggccagagagaagaatgaacgaacaccgtggctgggagatttatccgaaaggaatctatgattttgggatgaagattaaaaatgaatgtcctgatctgccttatttcatatcagaaaatggaatgggggtagaaggagaagaaaaatatatggatgaaaatggatcggtacaggatgattatcgaatagaatttgtaagggatcatctggaatggattgcaaaagcaatagaagatggatcaaactgtttaggatatcattactggggagtaatagacaactggtcatgggcaaatgcttttaaaaatcgttacggattcattcgtgtagcattagatcagggatacaagagaattgaaaagaagagtgctaactggataagagaagtagcgaagaataatgaattcgagtaggaagtgagtaatcacttcctttattttttattaataatattttaatgtactatctaattattatagtttataattaataacgaataggatgatatctctaattgttgtattaatattttttattattaggaaattagtaacatgttttgtctttaatcaatgatattttaatttttaaaacctattttgtcataaaatattttaataaaattatggcagttatttttactttgtggtaaattttgtttttaatttacttacaagtaaatttgttttataatgaacaaatgataaggaggcgtagaaatggcatttaattttcgaaataaaatacctaaggtacgtttttatggggcgtcagaacaagaacgtgaacaaaaaaatttacaagataacattgttagtcggcgattaatcggactactttgttttgttattgctgttacttccgtaatggcaatacgtttaggaattatacaatttaaacaggctgatgaattggcagtaaagctggaacaatatggtactactacatatacgagtgatgctcctagaggagaaattgttgaccgtgaatatgtaaaattagtggaaaatacaagtgtaatttgtgcaacatattatgcacctaaaaaaattgataatgatgttttaaaagaatcagctgcttttttagcaaaaaatatcaatattgatgtaaatgataaaaaaatcatttctgatcgagcaaaaaaggattattttattttagcttttaaagatgttgctgacggattgattagcgataaagaaaaagaagaaatcaaagctcaagaaaatgcagacaaaagattatatagtcttaaattagagagaattactgatgaattaattagtcaatatatggatgaagcaacattaaaatatactcactttttatacttgatgcaaaattgtacgagtggttcgtcaattttggctgaaggtttaactgatgaggaggctagtattattggtgaaaatgcagatatcttacccggggtgacagttacaacagattgggcacgtcaatattcaaattcaacagagtttgcttcagttttaggcaaagtgacgactaaaaaacaagggttacctgtagaattaaaaaatgaattattagcattgggataccaaaatgattctagagtaggaacttcgggcttagaggagcagtatgaagatattttacgagggaatgatagtacctataccttaaattatgatagctcaggaaacccaataataacaagtactaaagcaggaactgcaggttcaaatattcgtatttcaattgattgggaacttcaacaattggctaatcaaaaaatcgaagaggaattaaaagcttgtaatagcagtaataaatattttaataaaatgttttttattctaatggatccatatacgggtgaaattattgtaatggccggcaaaacaatcgataaagcaactggtgaagttagtgattatgcttcagggaattacctagatgcaaataaaatcggttcaacaattaagggaggttcaatttatactggtttcaaagaaggagtaattggaccaaacacttattttgttgatgagccaatcaaaattaaaggaacaaaagctaaaaagtcttggaaatcttttggaactattaatgaagttgatgctctggcttattcatcaaatgtttatatgtttaggatagcaatgcttttaggtggggcaaattatgtttatgatgggccgttgaaaataaatgaagaagcttttgatactttaagaaatgatttaggtgagttagggttaggagttaaaacaggattagatgtttcaaatgaagcattaggatatcgaggaaaacaacgtacaggtgggttgttattagatgcaatgattggtcagtatgatacttacacaaatattcaattagcacaatacgcatgtacattggctaatggcgggaaaagaatccagccccacttacttttagactcatatactactgatgaggatggagaaatacaagttaattatgaggcaaatacaaatgtattagatgatgttagtaatcaagcgacggcgtttagccaaattaaacaaggaatgagagcttgtgttacccgaactgaaggaactgcacattcttggaattcaaaaccatatgtaacttatgctaaaaccggaacagcagaagattatacaactgatgatggtaagactggaacaaccgattatcctaatcatttacaaataggttatgtgcaaacaacggaggattctagaccagaagttgcttttgcttgtatgagttatcgacaaactactgcaacaagcggatctagttctgctccgatcgttgctcaagcagtaattgatcgttactgggagaagtatcactcaacaaattaaaaaaagtgctagtaattatttaaatactatgataatatattagacggaagtttactaatggaggtgtaactaatgagagaaaatatcatttataaatgtactgaatgtggtgaagaaaactatatcaacacaaaaaataaaagaaatcatccagatagaatggaaatcaacaaatactgtccaagatgtaataaaaaaactgtacataaagaaaagaaataagccttattggctttttttctttataggaggaagaagatgaaaataaaaacattactgctaggtaatatgcaaactaatggctatgtggtaagtgatgagaatcatcattgcttaatcattgatcctggagctaatggtaagaaagttgtgcattatttgacggaaaatgaactagttccagaagctgttttattaactcatggacatttcgatcatattggtgcggttgactatttatacgaacattaccactgtcctatctatcttcatcaagacgatttagaaatgctagataatcctcagttaaatttatcagtgtatgaaaatccttttactgttaaagcaccagttcagtcaagccatgaggagatgaagtttggggattttgatgtacaatggctacatttaccaggacattgtccaggatcgtcaatgatttatttaaaagatgaaaatataattttttctggagatgtattgtttaaagggtcaattggacgctttgattttccaaattcatcaaagtatgaaacaatcgaaagcataaataaaataaaggaatatgattttgatgctgttatttatcctggtcatggaccaaactctacgttaagtgaagaacgcctaaataatccatatttaaaaaagtcgtaatttttatagtgaactgcctttgttggacaaaaaataatttaaattaattgtaaggcttgattcctaatttgtataggggttaagccttttctttttactgtaattatagaattattatggtattcgatataatctatcatagcttgttttaactcttctaatgatttgaatgtatcttcaaatccataaaacatttcattcttcattttttccaagaagttttctattagtaaattatcctgaccgttcccttttgagactttgattaagtaattcctttttcttttaatttattttaatatgagaaatgttggtactgccatccttgattactatggaaaaatttagagaaagccagatctaacattcggtatgtttgaaatagacttggtgtagttgatatatcgtatcctacgatttttctactatgcatatctaaaattggagataaatataatttactcatagctgttttaaactcagaaacatcagttgtccatttttgattaaccgatgtagttttaaggtttctattaaaatatgtttttctaatatacttattctctcgtttatcaagaagtaagttcttacaagttccattcatttctcccttataagagttataacgttgcttaggagtaggattaagtgcatataaacccatatgtgacatagtaccgctattctttgtttattcgtaagtttggacatataaaaagtgaaccgaataggttggacaacttattcggttcgctataattttttacgatttttttaataattcaattattgcagtattttacaataatgcgagttgatcgctgtgagtttattttaggaaagaatcccatggttgaaataataaaaaatgagtcatgatataattatcttagtgcaaatatattgcaacttgatattctactagcttatataattaatgaatatattaacttttctgcctgcatgctctttcaaattataaaacctgcttgcaaaaaatgaaagcagcttgcataaaggaatgtggcgttcttattccttcttcggatagaatgttagtgaaaggaagggataacatgaataaaaagaatttgttattgtcagtggcattatcaggaactatgctaatgtccaatggtattaccgcattaacggctcaaaatgctgtatatagtccgggcgtaacggtagagaaaaatactaatccagactgggatgccgattataccgcaacctttgtttatgaagacaaagatgcacgtgacgcagaaagagtaacagtttcaggtaattttcagttttactcattaaatgatccggttgttaaaaattatgaaaaaacagctgatcctaccggagccaaggtttacagtgcttatgactatgataaggataacgcaatgttcaatgtaagcggcggacaaaataacgatacacccatttatgaactggaggaaacaggagacgaaagattcgagattacactgccgttaccgggcaatcagtatttttatgattatacagtagagtatagtgacggttcaaaagttacgattcaggatccggtaaatccatcaaagaaaaacagcttaactgatcatgattcgggacacagtgttttctatgttggaaacagtgaaaatacaacagcaggacaggagtatatttatccaagagctgacggtcaaacagggaaatatgaatttattgaatacaaggatgcacataacacagatgaagaaacacagtcattaggtgtttatctaccatacaactatgatccttcaaaaacatataaaacgatttatgtatcacatggcggtggcggaaatgaagccgaatggatggaaattggttcattgccaaatattatggataatatccttgcggaaaaagaagcagcagaaagtgttgttgtaacaatggataacagtcactttggatgggattatgatttaattgcgaaaaatttcaaagaaaatatcattccgctgattgaagagagatacagcgtatctacgaaagtggaggacagagcgctgtgtggtctatcaatgggagcattgacaacagggacaatcatgttcagttatacagacatgtttggagcgtatggaaatttttcagggacagcagatccactgatttgtaaagactgggagttattaaaaacaaagacagtatatctaactggcgggaatctagatatggctattcaggcgacgcaggaatctggagattcagcatttaacagagggaagacagtaagagcacatgaatatttagaagagctgggagtagagcatttttatgatttaaaatacggttcacatgactggggcgtatggagagatgcatttacaacatttgttaaagatattttatggggttatgaatatcctggagaatctacttatcaagccggtgtgacagtagaagaaaacattaatccagcatatgatggtgattatataacaacttttgtatacgaagatcaagatatcaaggatgcggtcaaggtaactgtttcaggaaatttacaattctattctaaagatgatgaagcggttaaaaactatactcagactttagatttttcacaagcaaaagtatataatgcttacgagtataaagatggaatgtttaatactggctatgggttaaataatgatactgccatttatgaattgacagagacaaaagatgaacgttttgaaattactttaccattaccagggaatctttactactatgactatacagttacttatgctgacggcactacagtaacaattcaagatccagcaaatccgtcactaaaaaatgactacaataatcatgatgctggccacagtttggtgtatgttggttcttcaaagaatactattgatggacaagaatatgtttatgctagagatgataatcaaaaaggaacatattcattcgtaaattatgatgcgattgatggaacaaaacaaccattgggtatatatctaccatataactatgatgctactaaaagctataaaactatttatgtatcacacggtggcggtggtaatgaagttgaatggatgacaattggtgcggttccaaatataatgaataatttattagctgataaagaagcagctgaagcaattgttgtaacaatggataatacatattttggttgggactacgatcaaattaaaaataacttaatgaatcatattattccatttattgaagctaactatagtgtttcaactatcagcaatgatcgtgcattctgtggattatctatgggtggtcttacaacaacgtctatttatacgaccttagcagataaatttggatatttaggaatttggtcagcaactgatccaaatactgatatatcagcaataaaaaatgcggacaaaccaacattattattagcagctggtattgttgattatggtaaagttggatttacaggaaataaagattttgcaggattattagcaaatctagatgaagcaggcattaaatatgattatattgaaacttatggtgctcatgactggggaacatggcgtagtctgtttacaacatttgtaaaagactatttatgggatattaaagaagtaaaggatgagccaacagtaaatcctggagatacgacaaaaccggttgtaagtgtaaaaactggtgataatgttgatataaatggactgttactcatttctggactatcattattaggtatttctattcaatactattgtaaggctcatagaggacattaaaagactatatattttgaagcgaaccccaaaagttggacataaccaacgtgaggggtttttattatggtaaagttaacgagaaaaaagatgctataatttatagagagggattacaaaacccgctataaattataatgagagattatgaagataatccataatctctttaaagtatagtggggaaaatgtccggattatcattcctttcacttttttattttgtggactaatagaataagattcatatttattttgtgaataaatattatcctttttattgacctaaaccttagggcataatatgtaataagcgcaaggagaatgaatgctatgaagaccatgaagttgaagagtggtttcatattaccaagaaagcactcatatattatgaaaaagttggtttaataaaaccagatagagatgataatgactaccgaaattatagtcaaagcgatgctgatagtgtgaaacttattgtattttaagatcaatgaaaatatcactagaagaaataaaaaaatcaatatatcaatgtatagcagattgggaaaaagatggacgatacaatcatgtcgcttttgtagtcgcatctggaagtaaaatatctagcgggtatgatgatgtaacaattgcacaacatacaagtaactgttgtgctagagtaacctctttcgtaaacggatggggaaatacctctgtagtataaaatttacaatcgaagaactacgaatgagaatatagaaattgaaaaatagttacttgcagattctagtactagataagagtataaaatataggcgctttaaaataatgtagggtgcctaacaaaaagtagggttggaagatgtaatgtcttcattaataaccctattttttatgtgtctagatatattatccaatttatattttatttagatttgttttgcttaaaaggttagaataatcgtatttttttattttttaaaagtaatttctatattacaggcgtaaatgataataggaggtatttttatggatgaactatttgaaaaaatcttaaatcatgcaattaattataagacatcagatattcatattttaatgaagcaaaaatgttctgtttcttttcggcaacatggtgatttggtattatatgatacatttgaaagtcatatcggattaaaattatttaattatattcgtttcaagtcaaatatagatattaattatcgtttacgaccacaaacgggtcatttaaattatatttatcaaaatcaaatttactatttacgaatatctagtttacctggtagagaattagatagtattgtaattagaattttaaacaatcatcaacaaattgcccttgataagttgactatttttaaagaaacaactgtttttttaaaacatatcacgactttagaagccggactatttattgtaagtggagcaactggttcaggaaagtcaaccacactatataccctactagattcaattaacgctactcaacaaagaaatattgtcactcttgaagatccagtcgaaataaaaaaggagtattgcttgcaaattcaaataaacgaaaaactaggaattacatataataactctttaaaacaaatcttacgccatgatcctgatgtaataatgataggtgaaatacgcgatgagcaaactgctcgtctagctgttacatgtgcattaacaggccatttagtattaacaacaatccattcgtcaaattgccttacaacaatcagacgtcttttaaacttaggacttttaaaaattgatatagaggatgttttaattggcataatatgccaaaaaatgctctatcacaagtatacacatcagcccttaattttaccagaatatttaaatcgtcaaaaaattttaacttttttcaataatgaacttgttaagtatcaaacatttgaaatgaatgcaaaatatttattaaaaaataatttagttgattatacacaggttgcaggaattatttatgaatgatgatttacaattattagaaaatatcgctaactttttaaaacaaggttatttaatcaaagatgttttaaatttatgtctgataatccatcaaactgaaaaaataaagctgattgaacaaaatttggttgctggtaaagcatttgatgaggttattatagaaattgattttgacaatacatttattgaatactttaaattttttcgatttaaaaataatatttcaactgcaattgagcatagcttaaaaatatgcagaaaaaaggaacaaatatttacacagctaaaaaaagaattaacgtatccagttttactcattatttttttaatgtttttttcattgtttattgtatatggattattaccatcaatcatgcaattgtttgtcgaatttaatattagtccaagtattataactagaattatatttaagctttttgaaattattccaattatagtaattttcattatacttagttttacagtatttttcacaataagtatttatgctattaaaagaaaatattttaaacttattgatttgttaattgaaaaaatagttttaataagaaggttaatccaaaaatactattcactaaaatttgctctgtactataatgaattactgatcaatggctatgattcaactgatattattgtcatgctttatgagcaaatagatgatagtgatattaaaatgataatttacgaaatttatcgacaagttttagaaggagaagctttagaggatataataaatgattttgaatattttgaaccattatttatagcatattttaaattattaattcatgataatcaaaaagataaatcactcgataattatttaagggtatctattgatactttgcatatgcaggtaacgagattgattaaactctttgtaccaataatatattgttttgtggctggttttgtgattttagtttatgttgcaattgttattccgatgatgaatgtagtcagtaatttataggaggtatgaaagatgaaaaggaataatggctttacattgattgagatgattttttgtatttcagtaattttagttattttgttacttgttattcctaatgtaactagtaagaatcgggttgttaaagaaaagagttgtgatgcgcaaatagaagtagttaattcacaaatagttttatacgaaattgaaaacggagaacttccaacaagtattagtgatttgacttctggagaacatccatatttgacagaaaagcaggcaacatgtccaagcggacttaggatttcaatcagtgatggacaagcatatgtacgatgatagcggattcactctgattgaagttgtctttacaattagtataatcttaattttaagtacaattacacttcattttgtaattaattcaaaaccagtaatttctttacagcagcaatgtcaacaggtaatttcattgttagaagaaggaaaaagtagagctatgatcaaccacgagcaaataaatatagttattcaaacaaaacaaattagttataatggacaaaaggatcaacgaactcttacgattaacgacaactattatattgacgattattatgagtttcactttaatcataatggaaatatcagttcgggtggtcatctaaagatttgtagttcaaatggatgtaaaagtataattttaaatgttggaagtggagcattttatgttaaataagcaagggatgacattaattgaaacattgatggctttttctatttttatcagtattatagtattgtttctttcttgttataataatgcaataaatcatcattatcagattaatcaggattatacgaactatttaaaacagcaacaagaaaaggaggtagaactgtggcagacaagtggtttgaacgaatcagtcaacgaggttttacattgattgaagttcttttttctttatcaatatgtttattaattattttaaacagtgtccctattttaagaatagttactgcaaaagataaattatcttttaatctttctagttatgctcttggagttaaacaaatttcatcaattttgcatacggctaaggatattgaaatcaatgatgatttaacttacacaaatgcaaataacgaaatctttactatttcactaaatcatcataggatagtaaaagagccaggttttgatatcattatacacaatgttgatgaattaaatttttatcaaaaaaataagaatatttatatgaaaataatagtcgataataaagaacatgtttatcttattgctactgattatcaaataagtgagaatgaaaaagatgaagttgaaacagtattgtaataatcggggtacgattcttcaagtcgtgttagttatttttattgttttaatcttaaacataagtcttgtttttaataatataatagagaatagccgcagtctagaacgaatcagagaattagatagggcacgtttgttggaaataacaatactgagatattataaagaaacaattttaaatgatcttctttttagtgatgaaataagtattgatgattatttcattaattatacagtggatgatatggggagttactattatattgttacaacaatcaaacaaaatgattcatcatacagttttaatttggagattaatatcgaaacgctagtaatatcatcgtttgattatcaatagttactaaaatcacttcactttatcgatgatttttgatataatcacaaagtaaattacaagtaaggagattttaaaatgattagtgttggagatttaagaccaggaattacttttgaatatgaaggtaacttatatgtagtgcttgattattctcataataaaacagctcgtgcggctgcaaatatcaaagttaaaatgaaaaatatgcgttctggagcaactactgaaattacttttggtggaaatgataaagtaaaaaaagcacatatcgataaacgtaaaatgcaatatttatataattcaggagatgctttagttttcatggataatgaaacttacgaacaaatcgaaattcctgctggaaacttagaatgggaaatgaatttcttaaaagaaagtgatgaagttgaagtaactagttatgaaggagaagtattaggggtatctttaccaattaatgtacctttcactattacagaaactgaaccagcagtaaaaggtgatacagctactggggcaacaaaaaatgcaattatcgaaactggatttcaaattaaagtacctttatttatttctgaaggtgaagttgtcattgttaatacggttgatggaaaatatcaaggaagagcttaacactagtttaactagtgttttttttcatatattttaacttttagcatatattaaagtagttgataaaaggagaaataatatgaatagacaagccattacttttttaaccctatttagtctaattttggtactttcaatttactatattcttctaccacctgaaggtgaagccagtgaagtatctgttaataatgaagaattatcgcaaattgaagtattacaacaaaatttagaaaaagaaagagcagatttaattagtgaaaataatgcaattattgcatcaagtgatagcgatagtaataaaatcgctgctgctttggctaatattagtgaagctaaagaaactgctgctttagaagcaaaaattacaaagataattaatgatgctggttttaagaatgcatttgttgaggttgagaataaaacgattaaagtagttattgataaaaaggaagcaagtagtagtgatgctaacagtattattaaaacagttatggaaaagactaaaaatgagtatcaagttgaagtcaagtttatcagtgagacttgaattttatcttaaatttatatacaatgggagtatataaaggagcatttaatatgagtcaagaatattattcagtagaaaaagaatctaatttaggagctttaaatattggtttgagcgtttttcaagctatagttgtaaaagcagttgagtcagttgatggtgttcaatttgaaggaaatatgatcccaatgcctggaagtgggccagttagaacaaatattaataaaaataaccaagtaattattgatgttgatgtactaattgattatggattgaatgttgcatcagtgactagtgccttacaaaataaaatagctcaaagctgttttgaaatgacaggaatcaaaaatgttaaagtaaatattgaagttaaaggaattaatttttaaggttatcttcggataatcttttttgttttattatgatgcatttcgtttattttaaggtgcaaatatggtaaaatcatgatagatattttggaaggacggattagatgaaaaaatatagaaaaaaaataattagagaaaaagcagtaattgcaacttatcaaaaactgctagtagatacaaatgaagatgagattcgtgaatatttaaacagtgataaggatttatctagcaatcaagatgattttgattattgttttatgtttattataagtattgctagtaacattgaacgttataaagctgaagttgctaaatatttaaaacccggatggacgttagatagattatcaaaaatggaacttgcaattttattagttggatgttatgaacttttagaaactgaacaaagtaaagaagtaatcattaatgaagcggttgaattatcaaaaaaatattgtgatagtgatgcttataaattcattaatggattacttaataggattaaatagtggaaaaacgatatctgacggttagtgcacttaatcgttatttaaaagctaaaattgattctgatagtcaattacagcgaatcttaatcaaaggtgaggtttctaattttaaacatcatagttcaggacatttttattttacgctaaaagatgagcattcaagaataaatgcagtaatgttctcttcaaaagctagtaaagttccttttgatttgaccaatgggatgaaagtacttgttcaagctagtgtgtcagtatatgatgtagcaggcacctatcaattgtatgttgatacaattgaacaagatggattaggaaatttatttttaaaatatgaacaattaaaaaagcagttagctagcgaaggtttatttaaccctgaaaataaattagtaattcctaaatttcctagtaagattgcagttttgtcagcctatcctagtgctgctcttgctgatattattagaaccattcacttgcgttttcctgtcgttcgtgtaatcgtatttccaattccagtccagggtaaggatgcatatttggaaataattagaacacttagatatgttgatacactaggatttagtgaaattattattgcaagaggcggaggttcattagaagacttatggaacttcaacgaggaaggattagctcgagcaatttatcaatgtaagacacctattattagcggtgttggtcatgaagttgattttactatttgtgattttgttgcagattatcgtgctgcaacaccaacggctgcggcaattaaagcaacaccggacttatttgaattacggcaggctgtagacaatataaaatatactttaaataatttaatgaaacaaaaaattatattaaataaagaaaatttaaatcgattaaagtcattctatttatttaaaaatcctcaaaaaatgtttgaagataagacggctaaaattgattatttatatgatcaattaaataatgtttttaaccatgatttgattgaaaaacaaaacaaagcaagcaatttaatacaaacttttaatcatcaagccaatttatttacactaaatcagcgaaatcgtttagatacaattaatcgaacgatgagtcttgagattaaacgtaaattacaacataatcaagaaaagttttattattcattatcaaaattaaatactttatcaccccttaaaacattagaacgtggttatgcaattgttttaaaagaagatcatgttatttcatcagttgatgatttaaatagtggtgataaaattgaattaaaattacataatggcattaaaaaggccattatagaatagaggttaatttatggacaatataacatttgaacaagcaatgagtcgcttagaagaaattattgcggctctcgaaaataaccaaatatcacttgaaaaaagtgtagatttatttcaagagggaataaaactatcaaagatttgtagtgataagttagctggaattgaagataaagtagcaaaaatcttagtggatggaaagttagaagatctaaaaatcgaggaataacatggaaaatttaattgaacaaattaatgaacgattattagaaatcattgaggaatttggcgattctaaagttaaagaagccatgaaatattctttgatggccggtggaaaaaggattcgtccggtaatgatgctgcaggtgattcgtagttatgataaaaattaccaagattatctagatattgcttgtgcaattgagatgatacatacgtattcattgattcatgatgatttaccaggtatggataatgatgatttaagacgtgggcgactaacttgtcataaacaatttgatgaagcaactgccattttagctggcgatgcattattgaatgaagctgttaatgtaattattaaaacaaaagttcctgatgaattaaaaatctcgttgttagcaactttatatcaagccagcggtattaacggaatgattttagggcaagcattggatatggaatacgaaactaaattggctactcgtgatcagttagatttgattcatcaccataaaacaggagacttaatcagtgcagcgatgaaaatgggagcgttaattgctaatcccgatgaccaaaaaacatgggtagaaatcggttataagattggtttagcttttcaaattcaagatgatgttttagatgtagttggtgatagtagtttattaggaaaaaaagttggtagtgatcaagtaaatcataaatctacatatgtaactttgatgggagtagaacaatctcaaatgattgttgagcaatattttaaagaagcaatggaattaatttataaattaaagattaatcatggattaattctagaaataatggaaaaattaaagaaaagagtgaaataatggatctagaaaaaattacagatccctcttttttaaaagagctggatattagacaattgaatcaattagccgatgatatccgcaaatttttgattaataatatttcaaaaacgggaggacatctttcgagtaacttaggagttgtagaattgagcattgcactgcattatgtttttaattcccctaaagataaaattttctttgatgtaggacaccagtcttatgttcataaaattttaacgggacgtgctggtcaattttctacactacgccaatataagggactttcaggctttcaaaagcgttgtgaaagtgaacatgacccttgggaagctggtcattcctcaactgcattaagcggggccttgggaatggcagtagcaagagacttgaatcatgaaaattatcatattttacctgtgattggcgatgctgcaatggttgggggtgaatctttagaagcattaaatcatcttggctcaattaataataaagtgattattattttaaatgacaaccaaatggcaattggtaaaagtgttggtggttttggtgattttttatcttcaataagaattagtggtacatataataatttaaaagaggattatcgcaatattacttcgcacaataaaataggtaagatgatttttaatgtttccaaacgagttaaagattttgttaagcatggattgattgatgatacaatttttgaagattttggggttgattatctgggtccggtaaatggtcatgattttgatgatctaattagggttttaaatttagctaaaagtgcaaaaactagtgttgtagttcacgtggttacgaaaaaagggcgtggctataaatacgccgaaaatgatattgccggtaaatggcatgggattgccccattcaatattgaagacggaactatgaaaggtgcgggaactagttcgaaaataagttggtcaaaaatggttgctgatcatattgaaaggcagatgaaatcagatcaggatattgttgctattacccctgccatgattcatggttctgcaatggataatatttttatgcattatcctgagcgaagttttgatgttggaattgctgaagagcatgctttgacttttacagcagggttagcaatttctcaaaaaaagccatttatttctatctattcttcatttttacaacgtgcatatgatcaaataaatcatgatattgcaagaatggatctgggctgcttgatttgtgttgatcgctgtggatttgttggagcagacggacctacacatcatggtgtttttgatttaggaatattaacacctctgccaaatgtaataatttgtactccaagtaatagttgtgatgctaaacgctttattaacacatatttaaagaataacgatcatccttacattttaagaatccctcgaggcgatattgaagatatgaatgtaggtgatgagcttttaactattggtaaatggcaagttgtaaatcgaaaagattacgatgtaacaattatttgttatggtcaaaacgttaacttgattcgtgaattttttaaagataaagagataaaagttagaattattgatgctttatttattaaacctatggatgaagatatgttaaatgaaattattgatgaaaaaccgttgattgtttatgaaacagaattaaaaactggttctttagctagtaatattgcttattattatagccaaaataatattttaaaacggattcatagttttggagtagatgaccactattctgttcaaggaacagttgcacaaattttacaagatgagggtttagatatggatactttttatcaaaaagttaaggagatactaaatgaagaaggaaagaattgatgttttattagtcgaacagggcttttttgattctcgtgaaaaagctaaacgcgcgattatggccgggattgttcatgatgattatgatattattgataaaccgggaacaaaaattccaatagattcaaatcttcatgttaaaggaaacataatgccatatgtgtcacgtggtggcttaaaactggaacgtgccttaaaggagtttgaattagatataacagatagaataatggtcgatatcggcagttcaacaggtgggtttaccgattgtgctttacagaatggtgtaaaactagtttatgcaattgatgttggaaccaatcaattagtttggaaattacgcaatgatccacgtgttattgtaaaagaacaaacaaattttagatatgcaacaagtgaactgtttgaacatggaattcctacttttgcttcaattgatgtatcttttatttctttgaagtatatttttgatgcattaaaaaatattttacatagtggtaatcaagttgtagcactaatcaaaccgcagtttgaagctggacgtgaagaagttgggaaaaagggaatagtcaaagaaccatctgtccatcaaaaagtaattcaacatgttattgaatatgcaaatcatgatggctttgttttagaaaagttaacttattcgccaataactggtggtgaagggaatatcgagtttctagggctttttgttaaagatggtaataatgttgccattgacatagaaagagttgtagaaacagcacataattgttttaaagggtaggtgagataatgttagagagtatatatattgaaaattttgctattatcgaccgtcttgaagtcgattttcataatcatatgactgttcttacgggagaaactggggcaggaaaatcaattattattgatgcgattggtcaattaatgggaaatcgtagtcaatcaagttttattaaagctgattgtgatgaatgttttattgagggtgtttttacaattggtgctaagtcaccagtcttaaataaattaaaagaatatcgtattgattatgaagataaattagttgtttcaaaatcttttaatcgtgataataaatcgattattaaaattaattatcgtaatgtttcaaaaatggtattacaatcaatcatggctgatttaattgatattcattcacaatttgaaacccatagtctttttgatgctgaaaatcatttaattattttagatgagttcattaatcagcctttaaaaaaattatttcagacatactcactagcatatcgtacttatagagaaataaatcgtgactatcaaaaagcattaaacgaagagctgagtgatgagcaattagaattttatcaagctcaattagctgaaattaatagtcttgatcttgaagaattagatgaagatgagttagaacgtgaaaaaaaactgcttcaaagttatgagaaaacaaatgagcaaatttctaaatatcgacaatatatgaatggtgatcgtggtgctctagcaacattaagcaatgcattaagcgaattagaagaattaaacgataatcctcaatatcaaaatacgtatgaaaggatgtatgacctatattataatttaattgatcttgatgatgaaataatcaatgaatttaatagtactaattttgatgaatatcgtttaaatgaaattcaagaagtcttttttaaattaaatcgtttaaaaagaaagtacggacaatcaattgaggcgattaaagaagctaaagaagatttagaaatgaaagttgctgcttttaacaatcgggaaacatatttgaatgatttaaaaaaacaattggatattgcttatcaagagaccaaatcaatagctgagcaaattactagattaaggcaatcaaaagctaaagaatttactgaattagttacaaaagaattaaaatctttatatttagataaagttgtttttaaggttgattttaaattagttgattttcaaaaaaatggacaagataatgtagaattcttaatttctacaaatgctggacaaacattaaaaccgttgaataaagtagcttcaggtggagaaatgtccagaattatgttggcaatcaagatattgtccttatcttcgagctctgtggaaacaattatttttgatgaagctgatactggcgttagtggtaaagtggctgaaagtattggagcaaagatgaaatatattagcaagcagcatcaagtattgtgcattactcatttagcacaagttgccgcttttgctaaaaatcattatttgatccaaaaatcaagcaatgacaattatacaaatgtaaagattaaagaattatcttatgatcaaagtattaatgaaattgctaaattgatttctggaaaagaagtatctcaggaatcaataaatcatgcaaaaaaattaaaaataagtagtgaataattaaaagcatagaaaccaaactatgatgtaacgaatgttacaaggaggtttctatgctttttaaaaagctaatcctttcctttatcttagctttagccattattaatccaattgcaatatatgctatttctctagtacctggtggagattccattggaatcgaactagattatcaaggtgtggttattacaggaggatataagatcaaagtcggtaatgaaagctacgatccactagcaaaagattttaaagttggagatattattgtcgcaattaacaatcaaaaggtaacaagtattgaagaattaagcaatgttattaaagaaggcgatatagctaatcccagatatgatttaaccattaaaagaggtaaagaaaccctccaccacgacctccaggtcgtttatgaaaatcagcaattttctacgggattatatgtcaaagatgcaattagcggggttggaacacttacattttataacccggcaactagtacttttggagctttaggacatgcaatgagtgactctaaacttgacagcgaagagcttattcaaaatggtaatatttttgaaagtacagtaactagtattaaaaaagcaacaacgcaatcttcaggaaataaaattgcagacatttccaatattgaaataggtagtataaacagccatagtcaatttggtatttatggaacttataattatgatatttcaaaacgagaaatgatggaaactgcatctattgaagaaactaaattaggaaaagcctactttttaactgttttagatggtgataaaatccagaagtgtgaaattgaaatcactaaattgaatgaccaggattctataaaagaaaagggaattgaatttactgtgacagatcaagaagtaattaataaagctaatggaattgtacaaggaatgagtggatcaccgattattcaaaataacaaaatagttgggtgtgtgactcatgtatcaggtaataatccaattattggctatggtctatatatagattggatgcttgagatggataaataaggataaaaaggtgctcaaattgagcacctttttatttcaatttggtgagatttttagtataattatacagttaagggggaaacatgatgaatttattaacgataaaaagtgcatttaaagaaagtatccccgttatgatgggatatttagtcttaggatttgcttttggaatgttgcttgtttctaaaggatttccaatttattatgcatttattatgagctgttttatatatgcgggaagtatgcagtttgtaacaatttctttattagctggtcaagcttcttttattagttcatttattatgacactgatggttaatgcaaggcatttagtttatggattatcaatgttaaaaaaatttaattttttagggaaattaaaaccttatatgattttttcattaacggatgaaacattttctttacttgtgaaaaatgattttaaaagtaagaatgaggtttttttaataagttttttagatcaatgctattggatcattggttctttggtgggggcaacaattggaaataatgtatcttttaatactcaaggtttagaattttcaatgacagcattgtttatagttattgtaattaatcaaattaaaaataattctaatcatttagcgacattgattggtttttttgtcagcataatttgtttgattatttttggtagtgataagtttgttattttttctatgattttaatcatgataatattaattttagttaaaccgaggttaaaaaatgaataatgatgtcttgataataatagcagtagctttaggaacaatcttaacaagggtcttaccatttctgatatttaatgatgctgaaaatttaccaccggcaattagttatttatctaaagtgttgccatattcaattatggcaatgttagttgtatattgtttaagggatacaacttttatttccggaaatcatggttttccagaaataattgccgtttcaattaccattataattcatttattaaaggaaaatactttattatcgattttagtaggcacaattacatatatgatttgcattcaagtgatttttgcataaaggaggtatagtaatgcaagttgttttccacattgatcttaatgcattttacgcaagtgcagaaatatcacgtaatcctgacttaaaaggaaaaccaatagttatatctggtaaatcacgacgaagtattattaccacagcttcttatgaagcccgtgaatttggcattcactctgcaatgccactatttcaagcattagaattgtgcaaagatttaattgttttacctgccgattttgaattatatcatcgtttatctaatgattttttttcaatagtagcttcttatagcgaaattttagaggttgctagtattgatgaatgctatgtagatgtaactaaaataattatagataaacagattcatccaatattacttgctaaagaaattcaaaaaaatatatatgaacatttaaatttacgctgttctattggaatcgcaccgaataaatttttagcaaaaatggcaagcgatatgaaaaaaccaatgggaattactatacttacaaggtctaatttaaaagaaataatgtggccattagatattaaggatatgtttggaattggtaaaaaaactcagccaaagcttaaagcagtaggaattaatacaattggtgatattgcaaattatgataactacaataaactaagacaaattattggcaaaaatgcgctactattgtatcgtaaagccaatggaattgataatagcgctgttgatgctaaacaaaatgaattaaagtctgtaggaaactcaactactttaccatatgatacaaatgatgaggaaatactaagggatacattaaagagtttagctcgccaagtttcagcgcgagctaataagcgcaacttaatttcaaattcaatctcgattactataaaatatactcgctttgaaagtgttactagacaaactactgtcaattcatttattaatgattatgaaaccatattatctactgcaaaaatgttatttgatgctaattatagcggtcgacctgtgcgtcttttaggcatcagtttaaataatacaatcaataagaagaactacaaagaacaacttaatatttttgaaatggcgcaagaggatgaaaccaatgatgattctcttgaacagttactaaatgctatcaataataaatttgataagaagctggtgactaaagcttcatcatttgcaaaaaagactccccaaaagaaatatttaaaataaaagaataaaataatgatttgctcataagttgtataaacggaggataacttatgagcattttaaataaagtttttagaaatgaaaaagttttaattaatatattttctgcaatattatttgtttttggtatcttatttggcattatttattatttttatggtaatgaagccctattaaatttatgtaaatatatcttttttttcaaagataatgaggcaaccaataattataatctatatattacaattactagtttctacatatttttatctctaataatttcaactagttttttaggaacaatttttaatagttttgttatttttacaaaaggaatgcaattatcgattgcaagtattttttattttactttaaatacgtttgatgcatctatgctttttttaggtttttttccacaattaattattgaattagcattaacttatattatttctataatttctattagattatcaataaattgttttacaatttcatttttgacaacagaagtatttaatagtcgaaaaataattaattatatcttagattacgtaataattatcttaataatagtcacattatcaatggcatttaaggtttatgcactttagttagcaaatcgttagtatggttaaatttaaacgtgatataattattaagtgaaggtgaggtgaaagtaagtgtagtacttgctaaatttatgttaattaaagatgccttaagtgaatataagcaatatttgattgttgaaaagggtttgagtaagaatactatttattcttatctacgagatttaattgctttttctaattttatcggtgaggaatatgaaattaatcaaattgaaaatattaataaggaacatattcatctttatttaaaggagttatcgaaaacaaactgtactaattcaatttctcgtaaacttgtttctttacgaatgttatatatttttttagtgaaagaaaatattgtgaaagaaaatctcatgagtagttttaccttaccgaaaagagataaaaaattacctattgttttgtctcaagaagaaatgatagagatacttgatgggatcattgtttgtgatgcaattagttcgagaaatagatgtatggttgaattgctatatgcaacgggtatgcgtatttcagaattgttgaatcttactttgaaagatttaaatattaaaatgggatttatcaaagttattggaaaaggaaacaaagagagaatgattccaatcggttcatatgttggagagatattggaacaatacataaatgattatcgagctgaatttaatataaaaaatgatagtttattattttttaataagcatggtcaaagattaagtagagaagaattttattctatattacaaacaattgtaaattcaacttctataactaaaaaagtctcgcctcatacttttcggcatacgtttgcaactcatcttttagaaaatggtgctgatttgcgttctattcaagaattgcttggccacagtgatattagtacaacaactatttatacacatatttcgaatcaaaagattagaagtgagtatcagcaattccacccacgcataaaaaagcataatgatgggtaaaataatgtctagatatggaaacaatttaatgatatacttatgattgcgtaaaaagtgacgcaaggaatggaggacaagatgaaatacaacagagtttttttaattgtgtgtgattccttaggaattggtaatgcaaaagatgctaatttatataacgatgaaggatcaaatactttaaaacatatatgtaatgcctgcaatggccttgatttaccaaatttggaaggattaggattaggaagtttgggtaatttttctggaatacatcaattaacttcacaattaggatatactttagctttaaacgagatttctaatggtaaagatactatgaccggtcattgggaaatgatggggcttaaaactgaaaaaccatttattacatttaccgaaaccggctttcctcaagaatttattgaactttttgaagaaaaaactgggcgtaaatgtgttggcaataaggctgcaagtggtacagcaattcttgatgagtatggtgaacatcagataaaaacaggtgattggatcgtatatacttcagctgattcagtttttcaaatagctgcaaatgaagagattatcccgttagaagaattgtataaagcatgcgaaattgctcgtgaaatagccatggatgagcgttggaaagttggtagagttattgctcgaccatatgtaggaaaaagggtaggggaattcaaacgtactgccaatcgtcatgatttggccttagcaccatttggacggactgttcttgataatttgaaagataaacagtttgatgttattggagttgggaaaattccggatatttttgttgatcaaggaattactaaagcagttaagacggtaagtaatcaggatggaatggaaaaaactgttgaacttgcaaaatcagaatttaaaggattgtgttttgttaatcttgtagattttgatgcagtatacggtcatcggcgtaatcctgagggctatgggcaagcaattgtagattttgataagcaattggaggaattaatgaaatatttaaatcatgatgatttattaatgatcactgctgatcatggtaatgatccaacttatagtggtactgatcatactcgtgaacaagttccattaattatttattcaaaggaattattgaagccacgtcatttacatgatatggaatcttttgctgtaattggtgctacaattgcagataattttggtatcgaattaccaactattggccaatcaattttagaattaattaaataggagaatttatggaagataatacaaaacgattgatcgtgatgtcaattttagcttatgcaattggaacgtttatctttgctgcaggattaatgaccaagacagccgttagcataatattattttatataattgcaagcatattaataatttgcggtattttagcattatataataattataaaaaaaatcatcaaattaaattatacttatacttaatagtggtaggaattgttttcttgtttttaaatacaacggtattaattaataacttatagtttataaaagcattctaagattattggaatgcttttaattaggatttatcgatcaatttatttctgtttgtctattaaaaattaattataaaatttacataatatacattatgcgaagttatatatgttatatctactttaataattataagaggtaaggagtttttaatattccttacctttcttgattttatccatttcaaatgaatcatataaatttgttacatattcaccattgaaacaagctaaacataaactacatttatgtttttctttattaaaatggatagatttatcaattccttcttcagtaataaaggcaagtgaatcagcttcaatataattgcataattcattaacattcaaacgattagaaattaattcgtccatggttgacatatcaacaccataaaaacaaggatatttgattgctggtgaagcaattcttacatgcacttctctagcaccagcttcttttaacaatcgtacaattcttttagaggtagttccacgtacaattgaatcatcaatcataacaacacgttttcctttaacaattgaagaaactgcagataatttcattcgaaccccctgctctctcatttcttgagtaggttgaataaaagtacgacctacatatttattcttaatcagacccatttcataaggaatattagctgcttctgcatatccgattgcagcagaaatagaagaatcaggaacaccaataactaaatcagcttctactggtgcttctttaaataattgtttaccagcaagttttctagttgtatgaacatttattccatctaaattactatctggtcgtgaaaaataaatatattccattgcacatattttatcagtaacatcatttgtataaagctttgatttgatttgaccgtctttgactctaacgatttcaccaggttctaaatcacgaacaaattttgcaccaacaacttcaaatgcacacgtttctgatgaaaatacatatgccccattaggcaattgaccaatagaaacaggtcgcaaaccatacttatctcttgctacatacaaagcattctcaatcaaaatcaaaaaggcaaatgcaccatcaagtttgtttaaggaattacaaatacgatcaatcatatgaccttcttcacgcataattaaatgacctaaaatctcagtatctgaagaactagaaaaaatgcttccttttttttctaagtccgcctttaagacattggcattaacaatatttccattgtgtgcaattcctaaagatccatttaaggttctaaataataatggctgaacattagcaattccaccaccaccagctgttgaataacgaacatgaccaatagcatgatcacctttcattttgctaattttatcttgatcaaatacttcagtaactagcccttcacccttttgaattgacaaagcttctttattttttacaacaataccagcagcttcttgcccccggtgttgtaaactatgtaatccatagtagcacattgctgcagcattttcatatccacaaactgcaaatactccacattcttcatgtaattctcgatcttttgaaaacattaactaacctcctcttaaatacttttacattttataatgcagagataggttagtcaataaaaaataggtattataggcactcatttatataaaatttattatcttgacaactattttttaaaaaattggtcaacattgtacatatatacgtacaatcaccaattatttcattgtttaaatcactttcaataatcagttctttgtttgtttttgataagaaacaaacgattttatttagactttcataattagtatagattatttcactgacctcaattttagaagcactttcatgataaattgcatatccaattattttagcattatcataaaataattttattcgatcattataagcacggcaacgtgcaattaagtaattttggtaatagtcgatatctcttttacgataaccattaaaatcttttgtgaaatcattatataatttaagtgaatttacaaaatccagatcttcaataactgttaaatcataatcattttgatatgattttttgtcaacatttgtaattttatgataataatctttattaaatccaaaattataataaatttctggcatgtaagcttgaagtaaaatcttttgaccagcatattttggcaagttaagcacatagttcattaactttttcatcattccttgcttttgataattcttattagtagcaacaccaagaataaagtatgcctttatctcctgattatccagaacaatggtatatgggactatttgcatcattgaaacaaggaagttgttattttttaatagatatgtattttctttgctgtaacatttcataaaataaaagttagttgtttgcttgtcttcatcttcaaaactatcacgccataggtcaataattgaatgcagatcattatctgctgccggcataattgataggttattaggaacaatattatatttcttaaccattttaactgggtgcagcatttgtttagcacggcgtagtgattctaatcccatatcttcctcacggttaacaaattcataaccctcaaaatttcgttctaggaagaatttaccaattgccacatataatcctctaatatctttattagccttctctacgtgaatttgaacggtactgtgtttaagtggggaaccaataataaatgcttctaactgtccgttaatgtaaatacagccagtttttatttccaattcatgacgatgtactaacaagtagacaatcccgatatactcagaaataacactctcttctattcgatgagaaaaatcccattttttgagacactgtaaaacattatcaacatcttcatcttcaatttctttataaatataattcggattttctttaacaaacgcattaaagtgatttcttctcttttgcattttttttcctgccaaagattctagagatttttttgtatagacataatcatcaaaatcttcattatgcaaatacaaaaacttatctccatatctttctttaattaaactcatagattcttcaacagctaaatcgattctaaaaagaaagttatgctctttagcatagttttgcatatattcgattgcttcatagtagtactctggtttgcaaaaaggcattgcaaaaaacttttcgtctaaatatgtgtgtaacataaccatgaaattatcttttatttcataatatatttcatattcatgatcccacatcatcattgtgacaaaattagaattatagccctcataatttgcatcgtctaaatatttttttattttgtgataatcgtttaataataattttcgcatattactcctattgttttatttacctagcattgcattaataaattgtttggcagttcttcctgaaaatccaccgtgacgaatttcccaagttaatgctttttgatgcaattcgttacgctccatcattaaaccatattgttcggctaaaccatcaacaatatctaaataattttgacgatctggatgcataaataaaattttaacaccaaatcttgaacttaatgatgttttttcttgtttagcatcatttacattaacctcatcctgatcttgacgatcaccccatgtttgttttactaaatgacggcgattacttgttgcataaatcaaaatattatcaggtttcttttctaacccgccttcaatgactgcttttaagtatttatactcaatttcaaattcctcaaacgataaatcatccatgaataatacaaatttataattacgtgactgtaattcttgaataatactaggaagatttataaactgatgtttataaacttctatcattcttagaccatctttataatattcgtttaataaagctttaatactacttgatttaccagttccactatcaccgtataataaaacattgtttgctttttttcctgctaaaaatgcctcggtattttgggtaagtttttctttttggctttcataaccaatcaactgatctagtcgcccattacctatatgtattataggactaatttgctcattttcataacgaaatgctttatttaatccaaattttccaactccatacgttaaaaagaagttttctaatacattataaaatgattcaacatcattacaggcagttaaattgtcctgtaatgtttttgaaacttcgaatagttcaatattaatgacaggctttgaaggtgtgaatcctgttatcaaattttgttgtgctaatggcaagacactaaaatccgtattaaacattttgaaaataatcttaaaatcattcataacaatttcttttaaattagcagctattgttttttttctttctaatgctagagtaaacgaattttcattattaattaacaaataagttaataaactattaaatagattatcgtacaagttgtatttttcagctaatttaattaacaatgaaacaaatttactgctattttcaagtttcccatctactacttcagtatataatgcaaaacactcagcaatatctttatttttatacaatggattaaaaactattaaatcattcattttacattttcctttcaatataatgaaaaagacgagttaacgtcttttaatttttaaaactatgaattggtgcaggaattctaccaccacgattaataaattcagcacatccaaattggtttactggcattacaggtgcataacccaatagtcccccaaattctactacttcaccaacatttttaccgattacaggaataattctaacagctgtggttttttgattgatcataccaattgccatttcatcggcaatgattccagataaagtagtgactggagtatctccaggaatcgcaatcatatcaagtccaactgaacatacacatgtcatagcttctaatttttcaagtgttaatgcgccacggtttacagcatcaatcataccttgatcttcactgactggaataaatgctccacttaatccaccaacatatgaagaagccataacgccaccttttttaacttgatcattcaagattgctaatgcagctgttgttcctggagcaccaacactatccaagcccattccttctaaacaatcggcgatactatcaccgattgctggagttggagctaatgataaatcgatgattccaaaaggaatccccaatttttccgacgcttctaaagcaactaattgacctacgcgagtaattttaaacgcagttttcttgataatttcacataactctccaaaatcttttcctttggcattggcaatagcatttttaacaacacccgggccactaactccaacattgataattgcgtctgcttcactaaccccatggaaagccccagccataaatggattatcgtcaggtgcattgcataaaacaactaacttagcacaaccaatagaatcattttccttagttaaatctgcagtttcatgaatgatttcccccattaattttactgcatccatattaataccagttttagttgatccaacatttaccgaactacaaacattactagtaactttcattgcttcaggaattgaacgaattaataattcttccgcctttgtcattcctttggaaacaattgctgtataaccaccgatgaaattaactccagtttcatgagcacatttatccaatgttttagcaattttaacaaagtccgctgttgatttgcaagcattagagccaacaaatccaattggtgttactgaaattcttttattgacaataggaattccatatttcatttcgatttgtttacccgtagagactagattcttagctacggtagtaatttttttataaatattttcacataaaacatcaatatcatgatccatacagtctaataaactgatccctaatgtaattgttctcacatcaagattttcttgctcaatcattttatttgtttctgctacttcaaataaattaatcattccgattctccttaaatacgatgcattttattaaaaatgttttcatgttgtaatttaatatttactccgatttcttcacctaatttatctaaatcttcacagatagttccaaattcttcggtaattgaacttagttctacaatcatcatcatgttaaaataaccttgaatgatagtttgagaaatatccaagatattaacttgtttttccgctaaaaaactacaaaccttagcaataattcctacttgatcttttcctactactgtaataatccccttttgcatactattacctacctcctaattatttaggatattatatcatagttgtatacaatataaaacccctatttcttgaaatttcgtcaaaataaaaacggataaattttatccgtttttatttaatcgtaaggaattatcttcccattaattttttagcaaattcgtaaacagctttaccattcatcattccgtaatctttcatttcaattacatcataaggaatatcttttccagtatctgcaataattttttcaacttctttttttgcatatctaacttgtgggccaagtaatacacaatctacagtatcaataattttttcaccttctgtcaaaggtaaagcaaagatttctacttcttctccagcttcttttgctgctacttccatttttgttactaataaactagtagacatacctgcagcacatactaacataattcttgttgccataactaactctctcctttattgttaaatttcatataaaaagggcatcacaaaaaacgcccgttttatcttttgttatttcagtttaagctttttgattacccaatcattttcattgcagcttcaaatacagctttaccgttcatagttccataatctctcatatcgattacatcaacagggatagctcctgctttacgtccagcagccaatttttcaatagcagctttttggaatctaacttgtgggccaagtaaaatacaatctacttcttctaatactcttggtgcatcagagaatggtaatgcaaaaattttacattcaacacctgcatctttagcagcaccttccatttttgttactagtaagctagtagacatacctgctgaacacactaataaaatagttttcataataatatacactcctttttttttacctaaattaattttacaccgaatggcttagaatgtaaacactttcttggctgaaatgctttatttttttacaattaaaaatgaattttttagtaaaaaataacttctactcttagttaataaatcttaccattttaaaattttccttgttagaatcatcaatttttaaagctctttaacaccgtttttttgaagtggaattataaaaaaagaatctaaaaattttaatttttcttttataaaatatttcaaataaatctttttttatagtataacagacgctattcttctatacttgtctagaccattggtgtcaaagaataattatctttatttttatcctttttcaaatatgttatgatagataaagaaggaagtgattttacatgcaggtattagtaattagtgatactcatttacaaaatgaattatttcaaaaaattaatcaaacatatcctaagatggattattatttacattgtggagattcatccttaaaaaaagatgatttcttgttaaacaaatattatactgtaaaaggtaatcatgatgatgaagattttccagtcaatattattttagaaattggaaaatatcgctgtttaattactcatggaaatgcttacgatatatactacggaaatgataaaataaagcaatatatgattgctaataatattgatatctgttttcacggacatactcatgttcctgcatatacccaaattggtaaccgttatattattaatccaggcagtgtgatgatcaatcgaggttcatatggtttcggaacctttgcaatcgtggaaatcggtgatactataaaagtaaattattataatagtgaaacttttgaagaatgctcaaaaatggttctagacgatggaaaaatcgttttagaagaatttaagcaaatactaaaatagaagtgagatttaaaatttctcacttctatttttttcttcatttcgcttacgcttatattcaatcataaacattacttcttttaaatcttcatccggtaactctgttaacaaccgtgcgatattagcaatattatagtagtcgtattttttaccactcattatttcttctacacttcgtccatataagttagaaaatattcttaattcccctactgtaatatccctcttaccattttcaatatctgaaatggctgaatgtggtacttttaaataagcagcaacatccttttgtgtcaggtgtttgaaattccgataagattttaatcgtgccgctaaatctttatcaatcatcattatacctccgataaatagattttagcattttccttatttttcttcaataagattttgtatatttataatttatttcgacaaataataatttttatttatataattagataattaatcataaaaatatccattggttagttttgtttttaaactaatttgtcgaggtttagcaaacataatattatttttgaaatccctaaatacagctttggtgatttctggtgcttcattaccaaatgaaagcaaaataaaatcaacttctagtttttctaaatgatcaatgtaaagacagtgactattgaatattaagttattacagtcttgatctgggaaaatatcaaattgttcacctttacgatcaattaaagtaaactttccttgtttacaaagattacatttgatttttttacaattaaaataatgatcacttattaagcagtgttttagatgcatattgattgttttgccatacactgtcattataatattttgtttaatattatttaaatgattaacttgttttctactcatctcgagagaaagaatagcatcatgattattaaaataattcaaagcatagctattataaaggttgaaagtactatctaaaatacattttttatctttaaaaatttgtaatgctccatagtcacctactaaaatactatttatcttattgtatgagacactatttttaaacttgattaaaatatcctgattattcaaaaagcttgtaaatgggattatttctttatttacagaatgcgctaaacttatagcttcatcaagttcttcgttgataggaaaataatatgcatccacttcctctgttaacaatgcttttaattgtgccaaattataaatttttaccacaatccctttaatttgtttattaatatgattatgtttagttttaatcattggttttttaactttttttacctttactatcatattagaaagttcatctattgcttgacgacgcatttcattaatttctttaatactaaaaaaaccattatcaggaaagtcaatagtaatatcatttgccttaaatactgtatttcctaattttcctaattgttgtctgattctttgaggatctaatggcaatttagctgctgattcaattagaagattagaaactttttcaacttttaaatctttatagttgatggttaatcgtgctggttcgttgatttgacctgaaaatgccatagttactgtatttttaatattttcatttttataacttgctaaagcttcattgattagatctatatcaataaccttatatactgtttcattcttttttactggggtattcaattcgatttcaacaatatcaccagcattgccttgattaatcaaattattaaataaatataactttgtaatagttcgagtaaacccaacactcttgaaattaatccgatctccttgtttcaacttatcttgtaattgaatttttacaatttttcgatgtttatcataatctatcactgtaccaacttcaattcctcggtttccaggataatctttagccacaaaattttgatcttttaaaatatatccaccagtgaatccacggttgaacatttgcttcattttttttatacgctgctcaaatgcattaactgtcgtattttttaaatatgcatctattgcttcacggtattgtttaacgattgtagcaacatactcaggtcgtttcatccgtccttctattttaaatgatgtaacaccagcatcaattaattgcccaatattctcaaaggtacataaatctttaggtgataataaatagcttggaattttatctaaattcatactatctttttgcaatttataagcgagccgacaaggctgtccacaagctcctttgtttccacttcttttagcaatcatactcgacattaaacactgtcccgaatatgacatacatagagcaccatgaacaaacacctcaatatctagaattgtgttttgacaaatatcagctatttcatcaagtgtattttcgcgcgctaaaacaacacgatcaacaccagcatcttcaaaatatttaactgctgacaaattataaatactagtctgtgttgacatatgaatttcaaaatctggaaagtattgtttaacaaaactcatcagtccgatatcttgaataattaaagcatcaacttttattgtttgtaaaaacaaaagataatcttgtagtttttcaaactgattatcttcatataaagtatttacagttacataaattttaacgttgcgtaaatggccatatgcaactgcagcttgtaattcctcgcgattaaagtttgttgcaaaagctctggcactaaattcatttcctcctaaataaattgcatttgcaccattttgaaccgctgctactaaagcttcataacttccagctggagcaagtaattctatattttgcatgtgtattaatgctccgtttctgcaattaatgctatacacattttagctgacgcttgggatgctttttttaaatattcatcaaattggacagaagaatctcccttaccaaaaacatcacttaaagaacgtgtaataataaaactagtcccgaatttatagcatgtttgagcaattgctgctgcttccatttcagtacattttgcatcaggaaaattatttttaatgcgtgttgctacttccggtgtagcaacaaattggtcaccagaaacaattagaccaatttcgcaatttaaatttaagtttgataatattgttttagcttgagtaattagttgacgatctgcttctattcttgggggtaaacctggaacttcaccaatcactcgattgggaaatgccgtaatatcaaaatcatgttgacaaacttcattagaaataactatatccccaacttcttgagttaaacacagtccaccagcagaaccgatatttatgacataatctattttatagttagtcagtaataaagtagtacaaatagcagcattaacttttcctactccaccctgtaacaaaacgacttggcgctcttttatcgttccttgataaaatgtacaatcaagaatagagcgtgtttcagtaatctccatatattctttaattgctgccacttcttcttccattgctccgataattccaatcattctacttacctccccttcttttatgacatataaaaataattctttgtgatttatcatgatattcctcaaactcaccataatattgtacatccgtaaaacctgcctgtttcaataagctaagataaatttcaatatcgtaagtttgctgataatgcatttcttttatatgttcattattttccttatcaattatctcaatttcatgttccactttaccaagagcagtcttttctacatgccatttaaaatagaaatcatcagcatcttcttcttcaaaatagccatctagaatttcatccatcttataaagactatcaacatcaaatataaaggttccattatattttagtgattcatatacatttttaaaagttcttaatactttctttttactcaaaacataattaattgagtcacaaaggcataaaatcaaatctactgctttatcggttacaaaatcagtcatatcaactcgacctaataaaagattaacatctgcttccattgctttcaaacgtgaaacttcaagcatatctttagaaagatcagttgcataaatctctttacctgctttagctaaacgaattgcaatttcaccagttccacacccaagttcaagcacgcttttaaaatcagcgtgctcatttataaacttgaaataatcatcataaaattgttcatccattaagctgtcatagtaataagcaaaattttcgtatgacattaagctaaatattttgatacgtcaattcgtggcatatcagaccataatttctcaagattataactgtttcgttcgtcagcatcaaatatatgcacaacgatatcaccataatccatcaataaccacttgctattgcgtaacccttcaatttttttaacttcataaccattttcatgacagctgtcttcgacactgtcacgtaaagcattcatcaatctctcgttacttgctgaacaaatcacaaaagtatcaaaaataggactagctaactgcatgtcaattactacaatgtcctctgctaatttatcatctaatgcttttataattacttctaatttattcattaatatctccttttgcatatttattataaatttcaaaaaaacatccatcaatttttcgccctttttcatgggaaaaatcataaaaatcttgtaaacaccctttaaagccagcaactacatcttttttgcataatgcaattttttttgaagaatcgtaatctcgacttggatcgtatttatcagcttcataaatacacatatcaagttttgacatatataaagaagcagttgtatgatgcctaattgcttgtaatatttcaggatcatcaactaaatactcattttttgcaacatattcagataaccattgatgccaaaccgcctctggtttattaagataatctggataatttttttgcattattacaacagcttcatcatgaggcatttctttagcaatatcatgaagcattcctgctacatatgcttttctaccatctagattattagctaatgcaatttctttagctaaatgagccatgctcactgtatgacgatagcgttttaaagacattttatttttcacaattgtttctaaataaataccattattagcaatatattttaaaacttcaggatttaaagcatgtaatgcaccattccggatattattactagcgtcatcactggcaaccaaatctaagtgaataaaattatatttatctaaattatcattaatttgataacctatgcgatcgaataccactaattgagctaattgactcaattctttagcagcaatccatttatgatataaacttgcttgatccattcccatcataaaatataactgatcatttggatatattttttttagatatctaattgtatcgatcgtataattttttttactactatcttgatcaatctcgtagcggcaaatttcaacatttttatagcgctttaaagcaatttccaacatcgctaatcgttgttgtttagttgctcctgtagagtctttccatgggttgttagcagtcggcataactaaaattttatctaactttaattgcctgattgactcttcaatcacgcgtacatgagaacgatgaattgggtcaaaactaccgccaaaaacacctatttttatcatggtaatttataaatttccttttcacttgggcgatataaaataattgttcttcctaaaatttgcacaacatctgcttttgttttcatacttaactctagcgcaatctcattttttgaatcagcacatgattcaagaatttttactttgatcaattcatgagcttctagagcatcgtcaataccttcaatttgagtttgatgaactccttctttaccaatttgaaaaatagcatttaaattatgtgctatccctcttaaatatcttttttgctttcctgttaacataacccgattcctttctaaattaatgcttctctaataaaaacaccaacaccttgtggtgcatgaactctaacattggcattgggacaattaacactgacaaatcctagaccggaaataacaatatcaattttaccctctggtaatttaaaatcataacttgccatttcattaatatccttaatactttcaatttccggcatcagagtcaagtgccgattatataaattatcactgtttcccaatttagttctatgaatttttaataattttggaaaaaaacaagtaaaagaactacgcggtcctttaatgaaatcaacgcgtgccaacccaccaaaatatagtgtttgttggtcgtttaactgaaaattaattggtcttaattcgcttttaggaataattattctcaaatcttcatctttaactaaatgagccatctgatgattattaatgataccaggcgaatcatataaataatttttatcatctagtggaatttcaattaaatcaagcgttgttccaggaaattcacttgttgttattaaattatcagttactcctgcataatgttttaataaagaattaatcaacgaagatttcccgacattagtaactccaacaatataaacatctcgaccatgacgatattcattaatcttatctattaataaatctaaattataatttttggttccacttgataaaataacgtcaataggtttaattcctgattctttcaactgtcttcttagccaatgctcaattttacgatcttttagtgattttggcaaaatatctcgtttgtttccaagaactaaaatatcattattattaagatgccgtgataatccatttattaagctgccattataatcaaataaatcaactaaataaacaacaagacaatcatgatttccgatttcttgaagaatttttaaaaaatcatcactagtaagatctgttttttgtaattcatgataattttttaagcgaaaacagcgtttacaaagaattacatctttttctaaagcatttttaggcgcaaaacctatctttttttcgtcttcactttgaattatggctccacagccaaaacatctaatctctttagtcatactatctccttttcaaaccactcccattgtaccttattttaagccaattttaaagtaaataatcgttaaaataaaacttggtataattttatttatttggatgaatataaagatttttgtcctaaattaaaagattgacaatatatatgtattagaggtgaaatataaatgttttcaacattattatccttacttactaatggtttctttgtctcatacattaaatcaaaatcttttgagttaccactaacagctaaagaggaagaaagatatcttgaacagttttttaatggtgacaaagaggctcggaatgttttaattgaaagaaatttaagattggtagctcatattgctaaaaaatacgagaacaataaagatatgcaggaagatctgatttcaattggaacaataggactgattaaagcagtcgatagttataaacaaaaccataaaactaagttagccacttatgcttccagatgtattgaaaatgagatattaatgcatcttagaactaataaaaagactaacttagatatttcattaaatgagacaatcggtattgataaggatggcagtgaaatagttttaggtgatatcattgccgcaaaacaagaggagtttatcgatatagtagataaaaaggatactttagataaatttacaacatattttagtgttcttgaaccccgcgaaaaagatactttgattatgcgttatggcttgaataataccaaaaagtatactcaaaaagatattgctaaaaaattaaatatctcacgttcttatgtttcacgtcttgaaaaacgtgcattaattaaattattgcgtgaacatatgaaagaaaaaccgtaaattatataatttacggtttaaaaatcatcttcttttagaatatcttctagagatattttttcatatttaattggttctgtttttttgggtactttaacaaccgctttatttttggtagtttcaacctcatcactttcaaaatcatctaataaggtatgctctttgggttgtttaaagatttctaaatcaacttcggttttcttagctacatcataatcacttgttgaaattggagaatttatataaacatcatcaattacttgattagccgttaatttattagctacacttggtttttgctcaagattagcattattatagtcagttgctttaaattcaaatgaagtctgatcgtttaaagtgactgtaattaattgtgaattatcaacaattacggaatcttttacataaataattttagatttaggattcttatacaataaagttccttttgtagcacgattgcaaggtgttatatcgccaattttaattcgtttaaccccaccttcttcgctaataacgattaatgaactgctaactaatggattaaaaatattgagactaactaactcatcattttttaaatttacagctctaatcccagcggctttgattccaacgattgaaacttcttgctctgaatataatgctccatacccagctttagtcgttaagataattccttgattattatcagtcaatttaacatcgactacccgatcatcattctttaatcccatacatttaaggggctttgaatatcgagtaacttcaaaatcttttaaattcgtccgtttgatttgaccattttttgttgctagcataacgtacaatggtaaattaaaatcttttaccaaaatagttccgatgattttttcaccagcatttagttttactaaataactaacatgtttaccagcatctttccatttaaattcttcaatcttatgaactggaataaagagataatttccagcatcagtaaacagcaataaatgatctaacgtattggcttgatacattgaaactagatagtcattttcttttttgccgaacggaataccttcactagccttgatagaacgattactaattcgcttaatatatccatcacgggtaatagaaacattgatatcctcagataggatcattgctttctcatctattttaatttcttgaacctcatcacgaatttttgatagacgtggcattggatattttttcttaataccttttaattgatcaataataactttacgtagaacctcatcactgtttaaaatattatttaaatatgcaattcgattatctaattctttattttcattttccaatgtgacaatatcagtgtttgttaaacgatacaattgtaacattacaattgcttcagcttgtttttcgctaaaaccatatttttcaatcaagttatttttagcatcgcttttatcttttgattgtctaattgtttttacaacctcatctaaaattgaaattgctttaatcaatccttcaacgatatgtttacgctcattagccttattaagatcatgaattgaacttcgtgtaacaacatctatttgatgtgcaatatagccatctaaaatctcaattacccccattaagactggtcgcttatctttgattgcaaccatattatagttgtaatttttttgtagatcagtatttttgtatagatagttaagagtattttgtacatttatatccttttttaaatcaataacaatccgtaatccagtacgatcagattcatcacgaacttcgataattccatcgatattgcgattaaatcgaatttcatcaattttacgaactaattctgctttgtttacttcatagggaatttcagtaataacgattttattcatcgttttctcttcaatcatttcactagtactacgaacaatcactttcccacggccacttttaaaggcatttaaaattccttgttttccttcaacaatagctccagttggaaaatctggacctttaataaattccattagtttttccaaagaacagttagggtatttaattcgatgaatcgttgcatcgattacttcttcaagattatgtggaggaatatctgttgcataaccggccgatattcccgttgcaccatttactaataaatttggataggccgctggtaatacagttggttcatattctgtatcatcaaagtttaaagacattaatactgtatctttatctaaatcttttagtaattcaacagcaattgctgatagacgagcttcagtataacgcattgctgctgccggatcgttatcaatagatccattatttccttgcatatcaactaatggaacacgcattttccaatcttgggataaacggaccattgcatcatatactgatgtgtctccatgaggatgataattaccaataacgttcccaactgtttttgctgacttacgatatggttttgaatataaatttccttctttatacatcgaataaagaatccggcgctgtactggttttaaaccatcacgaacatcaggtaaagcacgatcttgaataatatatttagaatattttccaaagcggtcacccatgatagtttctaatgacataattatttttttatccacgcttattttctccttactcaattgcaaaattatcttctaatgtaaattggacattttgttcaatccattctcgtcttggttctactttatcacccattaatacagaaactcgacgttcaacaattgccgcatcttcaattgatacttgaattaaagtccgagtttctggattcatagttgtttcccataattgagaagcattcatctccccaagtcctttataccgttgtacattatatccacgaccaattttcttctttgcttcttctaattcgtcttcttcccaagcgtaaacgatatcttcctttttcccacttttctttgacactttataaagtggtggtaaagcaatatatacttttcctgcagtaattagatctcgcatatatcgatagaagaaagttagtaaaagaatttgaatatgggcaccgtcggtatcagcatcggtcatgatgattactttattataattactatctttttcgttaaaatcagctccaacgccagccccaattgtattaataattgttgcaatttcttcattttttaaaatgtcagccattgctgccttttcagtattaacaacttttcctcgtaatggtaaaattgcttgatatttacgatcgcgaccttgttttgcactaccgcctgctgaatctccttcgactaagtatagctctttacgttttttatctttagattgagcaggtgctaattttccacttaaaattttttcttgacgtgggcctttacctttacgagcagcttctcgagctttacgtgccgcatcacgaacttgagcagctttaatcattttcttaacaagattatctgctgtttctttatgctcttctaaaaaatatgtaagtttttcataaactactgtatctacaacatttcgtgcctctggcgttcctagtttagattttgtttgtccttcaaactgtaaataatgttcaggtactttaattgaaataattgccgaaagtccttcacgaacatcatttccttctaaattcttgtccttttcttttaataacccatatttacgagcatattcattaaacgttctagttaaagctgatctaaatcctgtttcatgagttccaccatcaccagttctaactaaattcacaaaagataaagtagtttcttgataaccactagtgaactgcatagcgacatcaacttctatttcattatttgtaccctcaatattaataatttcattaagagtctctttttcataatttaaatattcaacaaatgctgttaaaccattatcgtattgataacttatctctttacctgtacgttcatcaactaaatcaattttgattccttttaaaaggaacgcactttccatcaatcgttcactaatcgtagaaaaattatattcataaactgaaaaaatgcttgaatcgggcataaaatgaatcgttgttccagtttgatttgatttaccaatcacttttaacttcccaactttactaccaccatcttcaaatctttgctgccaaatttttccatcacgataaattgttacttcaagccatgaagatagtgcattaacgaccgacgccccaactccatgtaatccgccagaagttttataaccgccgtcttcgttaaacttaccgccggcatgtaaaatcgtaaggattacttctgttgtaggcttacctgaagcatgcatccctgtcggcattccccgaccatggtcagttactttgatactgttatccttacaaatcgttacttgtatattatcaccaaatcctgaaagtgcttcatcaattgcattatcaacaatttcccaaactaagtgatgcagtccgcgtgcatcagtcgaaccaatatacattcctggtcgcttacgaactgcttctaagccttcaagtatttgaatatttgactcatcataattacttttagctgccatataattcatctgcctcctttaatcacttgtaccattatacctaaattttaggtttttttcaaagattattgcatttttataatgataatatataatagtcacaggtgataaaaaatggatataatgatttcaataattttaattatactcagttatctatatggatcgattccctttgcattagttattgggcgattagtctataaaactgatgttagaaactatggttccggtaatttagggggaacaaatactggtcgtgttttaggaaaaaaagctggtgttgctgtaattcttttggatgcttcaaaggcattattagtaatgcttttaactagttacttatgttcactattaaaaatgaataatgatttagcatatatatgtgctttagcttgtgtgattgggcactgctatcctgtttttgcaaatttcaaaggcggtaaagcagtttcaactgcaatcggtttttttatggctgtcaatcctataggtgctgtcttagccttagtcgttttcttcattgttctaaagctttctaaatatgtttcactgtcttcagttttagcatcgtcttcagtattgtttgcaattccgtttttaaatatgtcaatgactggtaaaatcgtaactgcagcggttattttactgttaatttatcgacacaaagaaaatttaattagaattaaaaatgggacagaaaataaaattacttggatgtaaatatgctcgttaatacataaagttgtgaattatcacggcttttttatttaataaaaataaggatgcattatccaaaaagagatgcatccattaggtaattatttatatgtaattatttcactactttttagatgactatcatcatcaatatatttaatcttaaattcttttccatcatattcaacttcacttaaagaacaaccacgaacaacatatttattgatttttgttaattcggatgttttataattaagcattattccgtgaagaataataaataacatcccatgaatcgtaataaaaattgtatcatcatgatgttttttataaatatcattaaaaaaatcttttaaccgcatttggacttcatgatatgtttcaccaccaggagtgctaacatcatcatccggaagattccataatcgattataaattggatcatttaataattcattaataaggcatccttcgtatttaccaaaattcatttcttttaatcgttcgtcaacaagaacatgatcaaataatatttcacttgttgctttagcacgttctatcggactgctataacaataatcaattttaagttctgtgattcttgcttttagcaacttagcatcttctatgccttctgctgttagcggtgaatcttgccatccctgtaatcttttttcttgattccacaatgtttttgagtgtcgagtaaggtatattttcataaagtaaaaataagggttaccccttatttatattgtgacataacagatgacatgatttttttaatttgagcctcactaggtttacgacccatttccatatacattgcacgaatcattttttcgttgattggtggatttttttgtaattgttttttaaacatataacgtgctgcgaaaaaaccgataatcgcaccaacgattaaacccaaaattatattcaacatatttatacctccaagtttttagattgctctaccattataacataactttttgatatttggtataaaatatccaagaatatatttgtttttttatttgcttcaataattatatagtaatcatgaataacgcaaatcatttcttcttttgttaattgattatcaataacatgtttatttttatcccgatgataatcgtatcggtcttttaacttgtattcgataaagtcactaactccttcattatttccaaataaacactccatttgcttcgtaaaaaaaacatttttaggttcaatattaataatttgatttttcacctctggatattgttcaagtaatccaacaacattaggatttaacttatatattttatatgtattcatttctatcaccatgattagtgtatcaaagaaaatctaaatatattgtcaaatcatgcccaaaaatcaataaaagtgatgttattacatcacttttactagtccttataaaatatctttaacgttttttactacattttcaactgtaaaaccatagtttttaataacgatatcagcaggtgcactagcaccaaatttatttactgacattgttttaccatctaaaccaacatatttatgccaaccaaaatcactggccatttcaatcgataaacgagctctaacattgtgtggaagaatctcatctttatatttagcatcttgctgttcaaataactccattgatggcattgatacaacacgaacatcgatatcttctttcaataattcttctttagctgccattgctaaatttacttcactacctgaagcgataataattgcatctaatttattgacttctttacctacaatataggctccatgacaaacaccttcgtatgaagttgcagtcattgtggtaacattttgacgagtcaaaattagagctgtaggattattagttgattcaactgctaatttccatgcagatgccatttcgacagcatctgctggtctaaatactcgcatatttggcattgaacgtaacattgttagttgttcaacgggttgatgagttggtccatcttccccaactgcaatcgagtcatgagataatggtaaaatgattggcaattccatcaaacaagccattctcaaagcgcctttaaagtagtcagagaaaactaggaaaccacctgcagatacttttattcctgtgtgtaaagtgattccattcatcattgcaaccatagcaaactcacgaattccaaacgctaaattacggccatcataattttcaacactaaatgttttttcgcctgcaatatttgttttagttgaagatgctaaatcagctgttcctgacataaatgtaggattttgttgagcaacttcttgaatcatttctaatgaagtgtttcttgttgcatcgttatgaccaggtgaatattttttcattatttcatctaaatctaatgaaaagttcccagcaatagcattttctaattcttgagcaagttctggataagcatttttatagtctttcattaaccgctgccacttattataacgattttttccacgtttaatacatgtattagcaaaatcatcataaacttcttcaggaacataaaattcgtcatgatcaaagccataagaaattttagcatttttaccatcttcttttcctaatggattaccatgaactttattagttccttcattacttgaaccaaaaccaatcactgtatcaataatgatcaaagttggtttatataattctttttttcctttacggattgctttttgaattgcactaacatcatttccatctgttacacgaattacttgccatccgattgcttcataacgctttttcacatcttcactaaaagacattgataacggcccatcaagcgtaactttattggcatcatataaaacaattaatttacctaacgataaatgcccagctaaagaagcagcctcataagtaacgccttcttgcatatcaccatctccgcataatgcatatgtatagtgatcgacaacatcataaccctcacggttatattttgaagctaagaatttttctgctaaagccattcctgctgccattggaattccttgacccaaaggtcctgaagaagcatcgacaccatcagtaatatcacattcaggatgtcctggagtaatagaaccccattgtctaaaattctttaagtcatcaatagaaatttgataaccagataaatgcagcattgaatataacaatgctgaagcatgaccagaagccaatacaaaacgatcgcgattaaaccattttgattgtttgtgataaaaatccatttccttagtaaataacgtatagattgccggtgttgaccctaataccatccctggatgaccagagttagctttgttgatggtatcaatacctaacgcacgaattgttgcgattgataagcttgatgtttccattaatttctaattctccttttttgcacataaaaacttattcttattatacacaaaatcgtataaattaaaataagtttttcgacaaattatattaattttttaatttttcatcttttagcttttgtggcgtgatatcatttccttcttcgtcaacaactttaacacccattaattgttgcttaaacccactacgaaaagcttttaaatatttttgacgtaattctttttgttcttctaattcagcctcactgattgtaccatcttttttctttttagccaattcattaattcttacaattaattctggatctatattactcattttaattttctccttaaatataaaaaaggtagagagctttagatatttccctgttaagtacaggtgggcacctttaaatatactttaggatccctattcaaagacaggttttcaacaccgcaatttagatcaggttcccttatctatgatgtggaaatttatttactctctaaccaaaattattataacacagccaccttaagtgtcaacactttaagcatagcgatatgtgacaaaattattactttttcttaacaatacaagtactagtgtattcaatatcaaaatatttaaaagtgttataaatatctttaagttgaatatcagccacctcatcgactaaattcaaagcgatagttccttcaaaataatagcgactgaataaattcgcaatactttcaggactattaaataaatttataaataatccaatatttttctttttaattctttcaaagtctttttcttcaatcttaagctctttaaaatttttaattaagtcgagcaaatgattttttaatgtttcatagtcatcacaatcacatccaatttgaataaatgcatagtctctttcttgcgtaaaacttgcactaaatgaatcgttaataatccctttatttaaccagtcgttatataattttgaactttttgaaaatagtaagtcaaacaatagattcattgataactcacgtttgattttttctttaggttcagaaagaatttcatttattttaattgaaacaattattttattcatttcaacatccattgataaaatattttcttttgttttaaccttacaaggttcaatgtttttctggcaaataattggttgtgctgtttcaaaattctttttagcctgattttctctaattacatttatggctgtatcggcattaatattacctacgacaaataacatcatattactaggatgatagaaagtattatagcaagtttccaacattgttttatcagtgcgatttacggtttcaactgttcccgcaatatcaatggctacaggatgattattgtaaaggttttgaattgatccaaaataaacacgccaatctgggtcatcatcatacatttttatctcttgaccaataatccctttttccttctcaacgctttcaggagtaatatctaatctttgaacaaaatctaatagtaactcaatacatggatattcatttgaagtagtactaaataaataggctgttctacttgatgaagtgaaggcattggtactggcacctaatttagcaaactcatcagaagcatcagtaccattcatatcaaacattttatgttctaagaaatgagctattccgtcttctactttaatcatttcattaccatttaaaggtacaaaagttgtatcaatagcgccgaatttggttgaaaacaacccgtaagttttttcaaacccttgttttggtaaaagataaacttctaatccgttatccattttttcatgatataaagtttcttttaaagtatcaaagtatattttttccattatttatcactccctgttaataagaaaattgtatctaagtgtacttttttgctggcagcaataatttcttctttggatacacgcattaatttttctaaatattcatcatttgtttcttgaacacctgttaaatcccggttataagccaatgtaatcaaactaattggttcatctttagtttttgttaatgagctttttaacatcagttttgctaaatcaatttcatcattactaaaatcaccattttgaatattctttaattcttgggcaattaagtccttagctttttgatagtcactgccttcaattcccgcattaactgtcataatcccactaaatgccccatagcttgatgatatatagtaacataaactatgcttttcacggacaattttgaataaccgtgattgtgaaaatccgccaaaaattgcattaaatacagtcatcgcataagtgccaggatccttaaagttacaatcaacaacatatcccatatttaatttagcttgagtaatatcttgtttttcaactacttctaagatgtcattcttgcttgatttgaaattagtaactggatcaagcggttgactgctgctgctaaaacttagattttctttaaatacatctacaatactttcatcaacatcaccaacaacatataaatgtttaacatcattctctaagcattcaactaagtatttatagacctcttcattagtgattcgatcaagttcttctacatagccattattactaatggataaaaaaccaccctcacccatatttttgaataattgatctaatccgtacataaatttatcatcattttgaacaatcaaacgctcttttaattcttttttcttaatagcaaaagtttgttcatcaaattttccatttctaacattgggatgaaataaaacgtcattaaacattttgatttgttgcactaataaattttcttgatacggcaaaaatgtttcattaatacaaacacttgaaatatttaacacttgtccaattcccttagtcgctaaattagtgccaaaactcattccataaagatcttccaaatgagttgataatgcttgagttgagggatagttttctgttcctccagtaagcataaaagccaataaagaacgtttagtaacattttcttttgttaactttccttctaattttaatgacattgttatattcttaaattttttgcttggaataacatgtagtgtatatccagctaattgataactttttttcataaaaatctcctttacaaacctaatgtatatattatacactaaaaaataaaaattaaaaccgcatcttaaaaagaacaagttaaaaagaacatcatgatgatgttctttttaacaaattaacgttttgctttatcaaaaggttctccagcagcttttggtgctgcagaattttttgaagtaaaagctaataatattaaagtggcaacataagggaagattttaaaaactacacctggaactccagaatttaataaaaatggaattgaagcatatgttacagctaaagtcttagcaaaagcaaagaaaattgctgacaatgcgattcgccaaggtgtccagttaccaaaaattaaaactgctaatgctaagaatccatatccagcaactgtactagaatactcacttgttattgggattacatagattaaaccacccataccagccaatattccagatagaacaacgcctaaataacgcattttatatacatttactccagcagcatcagcagcttgtgggttctcaccacatgtcctaattcttaatcctgttttcgttttatagagatacacgtatgtagcaatcaaaatagcaataccaataaatgtagaaagataaaaatctttaaaaaacatatcaccaattattggaatgtctgaaagaactggaactttttttattaaaaattcattactgaacggaatacttttcactccaccaaaaatagtcttagcaacaaaaattccaaaagcaggagcaaataaattcaatgcagtcccagaaatagtctgatcagctttcatactgattgcagcaaaagcatgtaacagcgcaaataatccaccgattactccagaaattaataaagctactagaaacaatgcttgcccacttaaccagccggcattttgagcagtatgcataaaccaaatcccaaaaaaagctccaaaaatcataattccttctaaggcaatattaactactccagagcgttcactaaacaacccgcctaaagcaacgatcaacagagggatcgaaaacatcaagctttgtctaaataagaaataaaataaatccattattcatcccctccaatcaaagcttgttttttatcttttttacgcccctttcggcgttctaaaattaatcgaataaacaatgtgaaagaactaaaataaataattgctgcaacaattacatcgataatttctactgcaatatgtactgcttgaacatagtttccgcctaaattgatatatgcgataaataatgcagcgaaaatcacgccaagtggattgttaaaccctaataaggcaacaggaataccattaaaaccttcagcggctaaaacttctgctgttcctattgttcgtccagttcctgccatataaaccaaagctccacctagtcctgcaaaaaaaccggcaattaccatcgataaaacaatactttttttctcattcattcccgcgtatttactcgcatctggattatatccagttgcttttagttcataaccaaatgttgttttattcataataacataagcaagaatacatacaccaatagcaatgaacgttcctaaattaatgctcgaaccattaaaaacctgatctaatcctaaatttggtattgctaaacttgtaggaatagtatacgattcagcgccagtaggattatacataaatttttttactccttcaattactaatagcatcccaatataattcatcatgatactagatattacaacattaacattgcaataagctttaagtaatccaggaacactggcccataaggctcctgctaatcctcctgcaagcacagcaaagatccaacgaatagattcggggataaaagttgcattaaaagctataaacattgaagcaaaggctcctacaatatattgtcccggtgttccaatattaaatagaccacatttaaatgcaaaagccactgaaagaccggtcatcataattggtactgataaatataatacttcaccaacgcttttaattccacgataaaaaccacctcgaagtaagattgaaaatccttctaatgcctgattaggaattactaaaaacataattagtagtccaaaaatcaaaccgcataaaatcgcaatcaaagaagataaaaatgattttgtccatgctttatttttcatatccaacacctcgctttgatcccgccatatacaatcctaattcttcaacgttagtttcttttggatttaagtcagtaacaatctctccttcatacattaccagaattcgatcactgacattcataacttcatcaagttctaaactaattagtaaaaccgcatgtccctcatcgcgctgttgaatcaactgtttatgaataaattctattgctccaacatcaagcccacgagtaggttgaacagcaatcaataaatcacaattactttcaatttctcgcgcaataattgctttttgttgatttccaccagacattcctcgaacaatcgaatgtgatccttgaccagaacgaacatcaaatttttcaatcaatctatctgcataattataaatgttctcaaattttaagaaaccatgtttctggttatctttattaaaataattttttaaaatcatattttctgctaaattataatctagtactagtccatgcttatgacgatcttcaggaatatgggaaattccttttaaatttctttgcctaaccgaataatgggttatatcctcattatttaaaattatcttacctgtatatccagttaacattccagttaatgcatatacaagttcactttgcccgtttccatcaattcctgcaatacagactatttcaccacgtttaacttcaaaattaatatctgtcaaggcatttttcatagcgtttttcttacaataattgagattttcaacctttaaaaccgtttgcccaggagttgcttttcctttttcaacaataaaattaacatcacggcctaccatcatctttgacaattcttcttttgaggtcgttgtaacatcaacagtagcaacgtactttccttttctaataacagtacatcgatcagctaccgctttgatttcatttaatttatgtgtaataaaaataattgattttccttcggcaactaatcctttcataattttcaataattcttcaatttcttgaggggttaaaactgcagttggttcatcaaatattaaaatctcattatccctaaagagcatttttaaaatttcaactcgctgttgcatccctactgttatatcttttataagagcatcaggctcgatatttaaatgatattgtttggaaagatcaagaacctttttacgagcattgtctttggctaataatccatttttagtttcttcaacacccaaaataatattatccaaaactgtaaatgtttcgactaatttaaaatgttgatgaaccattccaattttataacgattagcatcgttaggatcatttatttcagcaatttcaccgttaattttaatgcatccctcgtcaggttgatacagcccgaataggattgacatcaatgttgattttcctgctccattttctcctaacaaagcatgaatctcacctttttttagttgtacggttatattatcattagccttaattccaggaaattctttagtgatattcaacatctctattacatattccataccgtcactcctttcttatctaatgttgatttttctcggttagattgagaaatacttttaaaaaaagcgagttgtctcgctttttattatttatcatatgtaatatttacattagtaacaggtactttagtaggattaccattatcattgtcagtaatatctgtcattgatttgattttaatttcaccacttgccactttatcaaatacttccttgtatgctgcagcattaaaatcacccaaacgatcaaagtcatctggtaaaccaacataaccacctgatgcatctaatgtttcgataccacctttaaatttatcatttttgtaatcgactaatttatcataaactgtcttttttacatcttttaatgctgaagtaataacaacacctgtcttgtcatcattttggttgctatcaacaccaattgcatatttgccagcttcttttgctgcagggaaaatagagttacaaattccaccaccgcatgagaaaatagcttcagttccagcatcataccacttagcagctttagttttaatcgcaggatcttcattaaatgttcctgtatatgtatacatcatatcgactgtaacacctaattcttttgctgcatcatttgctccttgaatatatccataaccataattaattacagctggtaatgcaattccacccataaatccaagtttagtgtgacctgctttgacagctgcataccctgctaaatatccaggttgtgtttctgtatacaatgcacaataaacattatcaccaggatcaactggattagatttagtactatccttctcatctggaactgttggtgtagcatcaatcaagataaatttgacatctttgtatttatcttgtaattcaccaattgcattacagaatttaaaacctggacaaacaataatttttgccccattttctacagcttcttcaatttgtgatttgtagccagcatcatcaaaacttgctggtttatagtatttgatagttgcatcatgatctttttgatactgttcaacagcttcccatgcagactgattaaacgatttatcgttaatatcccctgcatctgttacaagtgctacttcaaattcttcactgctactaccaccgcatcccactaatagaaatgagaatacaacaagtgaagccaaaagctttttcatattcaattttcctccttcaataaactatagctttattttaacattcttccttaaaaattgaaagcgattacatttattattcccgtttttttataaaatatacaaaaaaagacatctatttagatgtcctcttcttgatatccgcgaatgtaaacttcacgtggcttagagccaatctgtggtccaataacaccgtctgcttctaactgatcgatgattcgtgctgctttattgtatccaattcgaaactgccgttgtaataaagatgtacttgctttttgagcattgattacaaaactgcgacacatttcatattcttcatcttcctcttcttctttcgaagcagcacttggtgaagtagtatttaattttacatttatgtatttgtcatcatagctagcctcctgctgagtagcagtgtggtgagtaattgcactaacttcatcgtcagatacaaaagcaccttgaacccgcaccggtgaactagaacccattggtgaaaataacatatctccttttcctaataatttttccgctccagaagcatccaaaattgttcgtgaatcaattccagaagagactgcaaaagcaattcttgatggaatatttgctttgatgactccagtgataatatcagtcgatggtctttgtgttgcaacgatcaaatgaatccctgctgcccgcgccatttgagcaatcctcatgatacaatcttcaacttgtttgcttgcgaccatcatcaaatcagcaacctcatctaaaataactacatgaaaaggtaagatctctaattgttcgtccaaagctaattcttcattttttttacgtgcatagttattatagccttcgatattccgtacatttgccccagcaaaaaggtcatagcgatgctccatttccactacaacttcctgcaatactgcagctgcctttttaggatcagttactactggagctaatagatgaggtataccattataattagttaactctacttttttaggatcgacaagaataaatttcacctcatccggtcgagcacgcatcaaaatactacaaataatagtatttacacaaactgattttccacttccagttgccccagcaatcaataagtggggcattttatttaattccgcataaataatcttaccactaacatccttgcctaaaggaactaacaacttgttatcctgtaaatcttttggaatgtctttaattacttctttgaaacttaccattgttgcaacactattaggaatttccactccaactgccggtttaccaggaattggtgcttcaatacgaatatcttttgcagctaaggctaattttatatcatcttgtaattgcataattttattaacacgcgtgcccgtttccaattttaattcatatttagtaaccgatggtccaataaaaatatcactaattgttgcgtttactccaaattcatgaagaacatttgttagtgcttcagctttagataatgcatttcctttattatcaccagacttttttgctgtaggattttttaatagggataaggcaggtaaacgataattcttattaatctttttcttaggtttagacatatcattttcatggatctttggttctttatctttaatttctaaagtcatagaatcctcatcaaattcaaatgtagagggtactgattcatcttcttctaaatgagtagtatggattcgagctgaactctttccagggggatcttgctcttggcttgaagtattttcatcaccaaatatctcctctggaaaaaagccttttgctttatcttttttaggggtaaaaaaatccgtgaatttactagcgctttgatgcattttaatatcttttttagtgggtttctttttctttctttcagcaacatttttacgatgttctaaataaaacttactacctaacaaagttaaaccaattactaaaataaaaccagcagcaatcattgcccccgttttatcaaacaaagcacttaaaatgccatataaaacagctcctagaaatccacctcgattacaaggtgctgttgagacatattgattaattactttcattccaaccattaaatcatcatttaaagatgacataaaagtcaaaactgctcctaccaccatgtataatccgattgcacgaggaccagtaaattttggtaatttagcaaaataaattacatacccactaatcaaaaccaatgaaatataactaattccaacaaaatttccaattatataagtacacaaaaaattcagttgttcgccaattggccctaatttcattgccccgacaacaattaaaaacaagcctactgtagcaatgattcttacttttaaatcctcactaatttgatcttgttttgatttttttgaacgacttgttttcgccatgactcacactcccaactctaactcaatcattataccatatcatatctatttagcaaaagaaaaagcaaggataaacttgcttaaacttcgatgataattggcaagattacaggtcttttacctgtctctttaataataaacttatttgctttatctttaatattttgtcgaacttctactgcttctagtttaggatcatctttcatttcactaacacatttttcagcaatatcaataactcccttaataatatgttcagaatcccttaaataaacaaaaccacgtgactgaacatcagtattggcaataatttcatgagttttactatcaatcgtgactcctataatgactactccatcatttgacaactgaattcgatcatcaataactttatcacctacatcaccaacaccaattccatcaatcattacatcttcaacttcaatagtatcgcgataatcttctagttttccacttttaaacgataaaatttcaccattatcgataatagcaatattttctggtttaattgccatatttttagcaacttccaaatttgaaataaaatgttgatactcacccttaactggtacaaaatatgtcggattaaaaatttgtataattactttaatatcttcctgcgatgcatgcatcgaacataattctttattttttaatacatgaatatttgaatctgtcttatataattcatttaccgctttatttgcaattttttctgttccaggaataactggagaagcaacaataaatgtatcatttttatttaattttaaaaactcatccccaccatcaatgatatcacaaatatcatgatagattctttgcggtgtcccactgagcaacactactaaattatcatcaattccttttttaccaatatcagtagaaaaagcaataagattttttggtacttgaatcactgctttttttaaacgctgtccaatgcggacaatactatttgtgctatcatatttatcacgaccataaaaaacaatttttcgattatatttcttcgtcagttcaacaatttctttagttctaaaaatgttttgagcataacttgaaataatgattcgtccttcactatcttcaaaaatattatcaattttatctgtcaatttatgttttggtgatgtataacctggatttttagaataagatgactcacataaaagtgctaatacacctttttttccaatctccatcattttttgaatatcacatctaaatccttctggggcaccaaaatcaacaataaattcaccgctataaacgatatatccattatcagtccataaagccactccaacactaccaggaatcgaatgagttactggaaaaaattcaacaggaatgccagcaataataattgaatcattgcgttttacacgatttaactgataactcactctaaaattattatgttttttatgtcgcttgatcatttgttcaattagatcagctgttagtgctggagcataaactggggcattgaccgcttctaacaagtaaggcaaagctgccatcacatcatcatgaccatgcgttatgatgatagctacaactcgttctttattttcttttaagtaatcaaaactaggaataatgatatccactcctaatttacttacttctgggaatctaaacccggcatctaaaataaaaatctgttcttttatttcgatgcagtacatacttttacccatctcagcctgtccgccaagtggtaaaattttaacaacatctttcttcattttttcctccattattataatctatattatttcttaatcatcgctgaaaaacaatctttaccatattaacatattatagtatcgtttgctaatactttctacgttcattgtatcaaaattctcaagaaaagagaaatgatttaatttttactaacatctttaacatgtaatattattaacacaataaccttttttagccgtgttcatttaagaaattatttagcaaaagtgagatcgtaaatttcatcttgttctggtaaatgcgtaacatacccaattggtattttattttccgtcacttcaattatagttttagctcctgcttttccaaaagcaccgcataattcgatgcagccaactccctcaataaataattttttgccacaatacttgcttctgctaaattagtaacgccaattatttgtgctgtctgttgatggattgcggcatgatcatatttcaaattaaaatctcccatgattataaatgcaaatttcattatattgtctccttaaaattcaaactctaatctttaattagactttacgagtatctactttttcatagttatctagccgtttttaatagtatataacatccgcctcattaaataaataaatttaaagtatctttttttatttcgtgattcaaaaataatggagaaataaattaatatttctccattattttattcaattgttcttttgactcatcactgattttaactaatggcaaacgtaacttataaagaatattgctactttggctcaacgaatattttaatgtacttacaatattatcttgataaaaatatttaactattaatttaaaaaaatcaaaatataaatcattatgctgagtaattaattctctatactttttataacttagattagttaagttactaataagtccatcataattattaatttcattttgcactagcatctcttctataccgtatagacctaaccctttatttctaataatctgataacctgtgctatttacttcagtaatcaagccagttatattttcatgtttttctttcaattccaataaatgattaacagcaatcatattttgcttatgttgttgaataacaatcgatttattagttgcagtagcaattagatcaagatgcttaatcaatccgttttgggttaaactaaaaatttctggtaactcgatcatatagccagcaaattcgctaatgtctttaaggtctcctatctgtttaattactttttttgtacatgattcactaagctgcatatatatttcaagaccaggatagtgatagcaaacatatcgtaataagtgtttttgttctaaaaaagtcaatgaagcagcttcccctgtcctgctgccaataataaatttattatttccttgatttactaatttttcaatatgattatctagcgcttgataatcaatcatatcatcaatatcaaagggagtaattaaattagtaaaaatatctattttaatcactccttacaaccaaatcatgtaaaagattcaaatcttgtttttgattttttgctttcacataataactatcatgttcatttttagaaacaattgcaaatttttcaagaaaattccgataaatctcatcattttctaatccacaaccaacaaaatgtacttttgtataaagatctattttagtataatcagtttctagtttagctaaatcttcttcaaaaattaaataatcatcgtcaaagcaatcatgaaggaaactataatcgcttttagctattgtttcttcaaaacgaattagccaataattaaaatcaattgacattgttcggatatttgtatcatcatgattaatcaaagtaccaatcctatcatctttaaaagaacgtaacttgattttaaagccatcttttttatacccttccatcaatgctttgtaacaaatgatccgagctttgtgcttggctaaatcaagagcttgacgatagccaatatgcttgataagtcgtgcttcattaatatatttaggatcaccagtaaaaatgccacaaacatcactataaatatatacctcatccaaattcaaacgtcgtgctaggtatactgctgtataatcgctatcccctttttctagaatacgaatatttttaaatttatctattccctgaaatcctggcacgataatgacatcatatgtttcaaaatacttattgattactttggtatctaagccaactaaacgattatgcttaactttaagatttaactgcatacttgaaagcgagattgcattaattccttgtgatttcaaattactagataacacgatactacttattatttctccacaactaagcaatcgacaatgttcatcatagttagcattaagtgctagtgcatttaatgtatcagtggcataagcatctggataacgtcccatagcacttacaataactaataatttatgatccaaattattagttataacattagtaactagtttgattgaatcatttgtttttaaagcagttccaccaaattttaaaactctaatcatcttttacaccctcaaaaacgggctggagctgattattattaattgcattgattactgtttgaattacaagagtctcatcaaataacatgctatttggtttttttatgcagtcatcttgatacattgggacaagataaaaatgtttagtatttaaaatttgcatgatatttttaccagaattacttaaagcatcgtttgtcgcgattgctaaaacaacgttatgttcattacgaagtgttgatttacaagccattgtgacagcattatcgtttatccctatggctaattttgctaatgtgttgccgctacagggcattacaatcattatatccaaaggaattttgggtccaaatatttcactgtctacaacattagtaattacttttcttttagaaagtttttctaattcatcaattaattcgtcagctttattaaaacgagtattacaatttaaaattttttcacttgcaaatatatataaatcacattctaaagctgctaattcttttattacagccagcgtcttttgtagcgaacaaaaagaccctgttaatccaattccgattttcttgtttttaagcatattgatcaactgcccgtttaattgctttataaagcgcttttgcactactatcataggcatacttagtcggaagctgctttaatagatgataactttcatcacgatcacaagtttttaaaccatatggtgttgaagcaacatcataaatcttacaattaacatcttttgtttttagaatattgctgtcaattatttgactaggaatagtattaataacaaaatcatacccatttaaagtgagctgatccaaccgaatataacgatatcctttttcaacaacttcatcatgataatgatcactgcgattactaatgctgactttcgcattaaatttttcaagtttagctgctaaatcgcgtccacaatgaccataacctaagattaacacattagaatttgacaaactaattgaattatcaattatcatatacgcaatcactgcttcatcactaatatgcgtattttcaacaacaaagtcttcatcactatacaagtaacgataattaaatccctttaacttacttaaataacataatcgctgattctttaataatgaaagtactacagcattatttttaaaatcaacttgttcaaacccctgaccatctttacctaaataaataatatcacaagaagatatcagcctactatcttcttgaatttgataaccatctgcaatcattagctttgctaattgtttacaacgattatcatttccatttatataaactatcatattccacctctactataaaatatgataattaatttagtttgttactcgataatcactttcatcatgaaagtaattcaaaacccatttcttcagttaataaggctaatataatttcaatacgttcttgtaaattttctactgcttcatttaaaatctctttttcagacatttctgttgagaaatcaatcaagacaaaagaacacttaataacatataaatgcccactgttttgcttacctacagatatatgataattaagctgcaatcgatttttttcatcgtgactatatccaatttctatctgtgctcgaacatccgtggcacttgctgatacggtttcattaataatgtttgcatgaatactcttcattttgattttcattttaaaatcctcctataatattatttactattcaatgttcattttttcttttattatttacaattttttagaattttattaaaataacattattgggggttgaaaaatgtatctatttatgtttataatcacctttttaatgtcgttaaaaacctcttgggcatataataattttacttacttatcttatcaacctcatttaagaatatattatttaatttgggttacattaatttcatgtttcttattatttaaggtaattaaactttttaaacatattacgtatctaacgattgcaaataagttcttaatcgggagttgttttatttccatgctgacaggttcctatttaccttatcatcctgataatgaaaatattgtttcggttctccatgtcctcatttcatcatcaggaaccatctccctattatttattatccaattactaattaatcgtatcatgttagatgattatcagttttataaaaaaatgtctactctatttaggagtttagtcttattaattggaatgtttatcattatgtttggcgtaatcaatagtattgttgaacttttctttacttttactgtattgttttcacttgctcaaattgaaaagcactatttttaaataaattaagcataataaaaagtaggtatacttaaagaaattttatctttttatatacctacttttattgctttaatttaaaaaattattcttaattatccgaaatagcgttttaataatccagcaaacgcttttccatgacgtgcttcatcacgtgccatttcatgcactgtatcatgaattgcatctaagtttaatgctttagctttcttagctaattctgttttacccatagttgctccattttcagcttcaacacgcatctctaggttcttttttgttgaatcagttactacttctcctaataattctgcaaattttgctgcatgttcagcttcttcataagctgctttttcccaatataatccaatttctggatatccttcacgatgtgcaactcttgccattgctaaatacattcctacttctgagcattctccttcaaagtttgctcttaattcttttttgatctcttcatctacgtctttagcaacacctacaacgtgttctgctgcccaagtcatttcacctgtttgttcaacgaacttgtcagccccaactttacatactggacattgttctggagctgcatctccttcataaacatatccacatacagaacatacaaatttagccatatcattttcctccttatttaacagtaatattataatcctattcatttaccatttaaagtaatttgattaaatatttttttctaaataagtatactgcattccctcttttatcacactactatcacacccaagtgcttctagcaatgtgtacccaaaagctagagctgctgctggtccttttccagtaataatattctcatctctttggacaagtgcttcttgataattagaaccaattaactgttcttcaaaacctggataacaagttacggtttttcctttaataacatctgcttcctgtaaaacaatcggtcccgcacagattgctccaattattttaccatcatgattaaattgtttaacaagatcaataacccgtgaatcatctcttaaattacttgccccaggcattcctccaggaataacaactgcatcatagttatctaacccatcatagatttggtccattttaattttaatttgatgagagctagtgacttctaatttatccattcctaccattgtacattctacatttgctcgacgcataatatctacaacacttaaagcttcaacttcttcaaatccatcatgaaataatactgcgacttttttcattcaactcactccatttctttttttattattttagcaccaatcagacaaaaggtacaatttaaatgattgaattattattcattaagtaatataatggctttatcatttagtgatgatcgctcatcattaatcatttataaatcatgattgacactgtatctaggaagaacggtagtggaggcaaaatgaaatatagaaaagttaattattatatattctagtatttaatccaagctcattcccaatgaataaaagatggtgatgaagcatgattgatactagaattgtttttaaattattaatcaaatttgagatagttcaaagatagaaaggaagtaatatgaaaacaattattgtaggtattagtggcagtgttgctgcttataagacttgtgatttagttcgagctttaaaaaaattaaattatgatattgaagtaattatgactgaaaatgcaacaaaatttatcagtcccctaactcttggtgctttaatcaacaaacctgttctggtcgatgactttgacgatcaaggttatcaaattaaacatatcagctatgcaaagaaggcagactgttttatcattgtccctgcaacagctaatattattggtaaaattgctaatggtgtttgcgatgatattgttacttcaacctttttagctgctacttgtcctaagctgattgcaccagcaatgaatgttaatatgtatgacaatttagcaacgcaacgtaatattgaaagatgcaaaacttatggcattaaatttgttgagcctggctacgggttacttgcttgcggagatgttggccgtggaaaattagctgatactgatgatattattaacatggttgaatattgtttaagtcctaagccattaaaacataaacgtgttttagtaactgccggtccaactcaagaagcgattgatccagttcgttacatcactaatcattcaagcggaaaaatgggttatgcattggcaaaacgcgcctatcaattaggtgctaaagtaactctgattagtggtccgacagatttaagggttccgtatggagttgaagtaatcaatattaaatctgcccgtgctatgtttgaagccgtcaaagaaagttatgaaaaacaagattatatcattaaagccgctgctgtaggtgattatcgggtcaaagaaattgctactaataaaataaaaaagcatgaagattcattaattttggagatggttaaaaatgatgatattcttacttatttaggcgctcataaaacaactcaaacaatttgcggttttgcaatggaaacacaaaatctaattgaaaatgctaaggataaattcaaacgtaaaaattgtgatttattagttgctaataatttaaatgaaaatggtgctggtttcaaaaaagatactaataaagtcacttttattagtaaaaatgacgtacaatcaattgaacttatgtctaaagatgaattaagtgatttaatcttaaaaaaattaataaaaattaaggagagtcattcatgttaattgtaattgatattggaaatacaaatattacgatgggattagttgataaagatgaaattattgacaattatcgtctaacaacaaaattagaacggacttctgatgaatatggatttatgctgctaagtttcttgcaggcatctagcatattagttgatgaaattgaagacattattattgcctcagttgtacctaaaattatgtattcatttactaattcgattaaaaaatattttaataaagagccgattattgttggtcctggcattaaaacaggaatccgaattaaaatcgataatcctaaagaattaggagccgatcgcctggttgatgctgctggagcatattacattcacggtggcccttgccttgtaatcgattttggaactgcgactacttttgatgtaataagtaaagatggtgattttttaggcggtgcaacagctcccgggattggcattagtattaatgcgctatctagtcaggcagcaaaattaccagaaattgaaatcaaaaaacctaaaagtgtaatcgccaaaaatactgtatctagtatgcaagctggaataatctatggatatattggattaactgaaaatattattcgtgaaattaaagccgagtataatgagaaacttaaagttatttctactggtggactaggtcggattatttttaatgaaaccgatttaattgatatatacgaccctgatttaacctttaaaggtttgaaaatcatttatgataaatatcgaaaaaataacaaataggaagtaataatacttcctatttgttgtctaaatttcaactcacgtattaattaaattttttttcaatttcattaatagtgtatacacctagattactattatcctcttgatacattaaaataatatctgataacggtactcctaaaacatttagttcccgctcaagccaatcaacatcatgattaattgattttaaattttcatgaaaaatcgttccttctttaactaataaagtcggcggattaactttgttaattttaatatttaaatcattgaccacagtaggacgatatttttcttttggaaaaaaacttaagcttccatttgtttctaatacaaccatctgtaattcatttaaatcaaagtagccccctattcgacattgcattaaaaattcatcaacatcaagtttagccttttccaattcttcattatatatttgatcattttcaaataaaaccaccggatgcccgtcaataatatttctcatcgttaaagaagtacttgctagtttggaaaggataattattacaattgtatatacgatcatagcaataagcggctttaacatattatcaaacccacccatgactagctcactggcaatactcccaattgtaattccatttatataatcatacatatttaattggctaacttgtcgatatcccatcatttttgttattccaaatagaactgctaatgatataacagggacaactatatattctaatatctgcatattctcaccaattaaagtatgtccttaatatgcaaaaataaacgaaaaagattaatctttttcgtttacataaatactttctatttcaccaatataaatataatgataatcatgatctggataatttttcacatctagagaaacatcaatgaaccctgttggttcaattttaccccgatataattttttacaaaccattcccattgtgccttgtttgaataaaggctgttcattaatcatctcaacattaaaaccaacttctcttattttatcactgtcacgtccagattttgaacctagaacccctaattcttttttatagccatcaaaaaaagttaacgtgaaataatctgcactatctacaaattccttagtatatcgctgtggtctaatatacacagtcacaacatttttattccagatcactccaacgctaccccaagaggcagtcattgtatttatttttccatctttgacagcactaattaaaagccaatcttttccgattgttttaaacggatttaaacttaattcattgacatctatttttttataactcattttaatcctcactttttagtttattaaataatttaaaagctttctcaactaaactcatgtttgatacacgataagtccaattggtatcattaacttctcccggaatattaaaccgttgttcattatctacttccagcaaatcccaaactggaacaattacatcactggcattggaatgtaagcagaatttaataattgctaaatttagcggcagtttttcatcaactattttctttattttattcaatgcttcttcattaaggctatcgctccatcctttgattgtttcgttatcatgagttccgggataaaaatatgaatgttcaagatcattaaaaccatcatctaacataaattgaaaaactttcattcctttgagatgataatgattttttaattcaataacttcaggacgcagataacctagatcttctgctactaaatcaatacttcctagagaggcatataattgatcaaatagttcgtagccgggagcatatttccaacttccttcaatcgctgttggtgcatcaacaggaatatcccaatacgaatcaaatgctcgaaagtggtcaatacgagtaatatcgaagatcttactagcccagccaattcgatcagtccaaaatttaaatttattaaattttagatatttccaatcataaagaggatttccccaatattgcccagttggactaaaataatcgggtggaacaccagcaacacttgttggataacccgcttcgtccaataaaaatgactgattatccaaccatacttcgactgaaccgtgatcaacataaaatggcatatcaccaataattttgattcctttatcattagcatattttttaaatgaaaaccattgatgataaaaaataaattgaacaaattgatagtaagcaatctgctctgtatattttgttaaatttacctgatgatatttaggataatctttaaattcagtcggccatgatgcccaatcataacttttattaattgaagcaaacgtacagtagagagcataatcaaaaacccaagggcatttagttaaaaaacgatcgtactgatcattgcccttaaaattgttatatgccaataataaatatttatgcttaaattttctgattttgtcataatcaacatttgatgtttcagaataatattcaggtacttcatctaacagcccattttcgactaaactgtttaaattaatatagatttcatctccggcatatgtacttaccgcacgatatggtgaattagcttgagtagaaggatgaaatggcaaaatttgaagatattgacctttatttgcagcaagctggtcaatgaccttataagcttcttttcctaaatcaccaatcccatgttttgaaggaaaacttgataaaggaaataaaattccactcttcatcttaataacctaaatcttgatcaacaataacgatcttaattcgattaatgttaccttgataccccaatttgacatagctgctgcatattctatctgctgataaacaattcatacatgtccctgttttagtacatggtgtttttttatttaaacgaacagcatttgcgggagcactaattgatttaatgtgattgattgcttcttcttcactatcaaaaatcttatttttcccagcgattacaataacttcttttggaccatagatcatagctgcaacacgatttccatttccatcaacattgtataaacatccatttgtagttagagcatttgtgctcgttataaataaatcgctagtaaaagcttttctgaatatttcctgcatttgttctcgctctaatccctcttgatagcgatcatgcaataaaacatcagattgatgaattaaatcaattactcctgtttcaaataaagtcatcgaaccacctaaggcaactgttttgtgattacataaatatttttttaaataattatgtaattgttcaaagttatcaacaaaagtaatttgcatattattttgttcaaacgctttgatcatcccatcttgtttaattttaataatagttcctaaatttttatccataatgtaagtcctttcattggttatctatttataattatattatttgtcaatcaagaaatcaataaagctaaatgataaacaataaaagcaactacgtaagcaattcctgtttgataacctgctgtcaagattgcctgtagccaagaaccaagttctcgttttgttgccgcaaaagcagccacacaaggcatatataatactgtaaaggttaaaaaagcaaatgcacttgctggtgtaagtaaagtattcaaagcatgatataaagcatccgggctacttgaattagtaaggacagataaggttgagacaaccgattcttttgctgttattccagtaatcaaagatgtcgataagcgccaatcagaaaatcctaaaggtgcaaaaataaatgatagtttatttccgatgtaagctaaaatactttttgaactatcagtgaccatttcaaaacgaaaattaaagctttgtaaaaaccaaattaataaagatgcaataaaaataattgtaaaagctttttttaaaaaatcctttgctttctcccacatatgcataatcacatttttagctgttgggattcggtaacttggtaattccattacaaaaggaattggatcaccagggaaaattgtcgcttttaataataatgcagaaaaaattgcaactaaaattccaatacaatatatagtaatcatcaccagtggggctttcgtactgaaaaaagctgcaattatcatcccatatattggcaatttagcactgcatgacataaatggtgtcacaataattgtcattttacgatcacgttgagacgataatgttcgtgaagccataattgcaggtacagaacacccaaatccaattaacatcggaacaaaagatttaccagataaacctatttttcttaacagcttatccattacaaaagctacccgtgccatatatccgctatcctctaacatcgatagaaaaaagaataatacaacaattaacggcaagaatgataaaacacttccaactccagcaattactccatctcgcagtagcgaaattagccaaggtgcaacttgatgattagttaaaaatgtaataatcgtactcccgataaaatcaactgctatttccattaatgactgtaacggtgcaccaataacattaaaggtcagaaagaaaatcattagcataacgacaatgaagattggtattccaaaatatttatgagttaaaatagaatctattttttcagaacgtacttgacccgcagtttcttgctctttaaaaacagtttgtcgtgtgatattttcaattacttgatagcgcatatccactaaggccgcatctttatccaagccttccttttcttccatatcctcaataatatgtttaataatatgaagttgctgaacatcaagatgtaattgcctgataatatctttatcaccctcaataatttttgtaacggcaaaacgttttggtagttttgccttaactgcattatcttcaatcaaatgggttattgaatgtatcgctttgtgaatctcacctgaacaaagatctaaatgtgaacagttattttcttttagagttgtttcaatagcctcgatcaattcttcaattccctcatttttacttgctgataacggaataacccgtattcctaacgcctgttgtaatccttctacatcaatgctattaccactactaataacctcatccatcatattcagcgccaaaatcattggaatatttaattctaaaagctgcattgttaaatacaaattccgttcaatactagtcgcatcgataatatttattatcattgatggtttttctttaatcaaaaaatcagttgagacgatttcttccattgtatatggtgttaatgaatatattcctggcaaatcaactaatttaatcgatggatgttttttaatagttccagatttttgttcaactgttacacctggaaaattaccaacatgctgattcgaaccagttaaagcattaaaaagagttgttttaccacaattctgatttccaattaaagctattgttttagttggcatcactaatcacctctacttcaatcatcgctgcatcatctttacgaatcgttaaaacataacttcgtaaataaagttcaataggatcacccatcggtgcaatcttgcgaacttttacaactgtttttggagtcaatcccatttccaacaaacgacgacgcaataagccctctccgtgaacaatcgtaactttcccactcattcctggaattaatttatctagtgtcatgttactcctcctacaacctatattcttccagatcatcaggcacaaagatatttccattaaaatattgctttgcttcatcagtgtacaattttttacgatgactaagatttttttcctcagtatgatataaaatcaaattcttgatatttaatgtttgtgctagttcgctagcttctcttactgttgaatgatgcttttcgtatggcttaaaaaaatcacgttcttgatataaacaaaaagcttcacttaataaccattttgaatcaacagcatattgataacataattcattgaatggctcatcacctaaacatgtcaattttccatcatctaattcaatcgaaaaaccaaattgttttgcttttgttgagtaaatatcaaagaaagtcacaagatgttcacaaattgtgattttttgtccatcttgtacttcattaataaatatgcgctcatcaattaaattatagagcctctcttgtactgttagtttgataattgtttttattgtagaaaccaattcatcatgacagtatatgttgaagttaccgtcatattcaccacttttgattttggttgcaaccattctaaaaatccatactactcccaatacatgatcagtgtggctatgcgtaacaatcatatttgttatttgggataattcgatctttgccagttcgagctgctttaaaataccatttccaccgccggcatcaaccaataaatattcatttttatttttcaaagcaaagcaagtattataacaattttttacacctgcatttcctgttcctaatataattaccttctccataaatatcctccgcgctaaattatacaccatatcaaataaagtttatagactctaactttaaattaaagaaaattaggaccggctaaccagtcctaatcaattatcgtaatattctcattgaatttaagattgcaatcaatgttactccaacatcagcaaacacacccatccacatattggcgtatccaaacattgttaataataagactccaattttaataatcaatgtaaaagtcacattttgttttagaattttatttgttttttgtgaaatactgattgcttcaccaatcgtaacaatatcatcattcatcaatacaatatcagctgcttcaatagcggcatcacttccaacaccacccatagcaattcctaaatcagctcgagctagaactggtgcatcattaataccatcaccgacaaatgataattttgctccctgattgattagagtttctacttgaattactttatcttgtggcaacaactcactataaactgtgtcaattccaatttttttagcaatatcttcggctacttcgctacgatcccctgtcaacattacagtatttttaataccatattttttcagatgtttgattccttcaatagtagtttcttttattttatctgcgacaacaatattacctaaatatttaccttgacaaacaatatgcactactgtccctactgtagatggattattgactgtaattcctaaaccttcaatataagatttattacctaaattatatactttatcatcaattttaacttcaatacctttacctgctatctctttaaagtcactaattcgcttttgatcaatttcttgaccatattttcttaaaatacttttagcaattggatgatttgacatactttcaccatatgctccaagcatcaataagtcatcggcaccattaatttctacaacttcaaagctaccttctgtaagtgttccagttttatcaaacacaacagtatcaatatcctttaataattcaagataattaccgcctttgattaatgccccaactttacttgctttccctaatcctgcatatagtcccaatggaattgaaataaccaatgcacatggacatgagacaactaagaaagttaaagcccgatataaccaatctgtaaatactgcatctttaaaaatcagcattggaacaattgcaagtgcaacagccaaaaatacaacagttggcgtatagattcttgcaaagcgtgtaataaattgttcaattggagcttttttactagctgcattttcaactaaatctaaaattcttgaaacagttgaatcttcataaacctgagatactttaagattaataattcctgttaaattaactacgcctgctaatacttcgtcacctttgctaacattacgcggcagtgtttcaccagttaaactagatgtatctagagtactagcaccttcaagtacaactccatcaagaggtaccttttcaccaactttaacaataatctcgtcaccaatcttaatttcttctggagcaactttttttatttcctcacccactaataaattagcataatcactttttaaatccattaatgaactaattgaagttcttgttttattaactgcatatgcttgaaaaatttctccaacagaatagaataacataactgcaatagcttctttatagtcactgatacaaaatgctccaatcgttgcaatacacattaagaaattttcatcaaaaacctcaccacgcctgatattctttaatgcttttaatataactttataccctactaataaatatgcaattccataaacaattgctgcataatcaaactcgcccgctataataccagcaatataaactaaggttccaccaattaacccaagatgttccttaggaacaaataattttggtttttcaactactttaatttcatcttttaatgtcaaagtcacatcgtcttcaacttgatcaactactttttgtagttttttcaataattcattttgagcaatcgatgtcttaggttttactttcagtgtttcagtagaaaaaataatcattgcttcatcgatttcattcattttattaattgcttgttcaactttcatagcgcaatttgcacaatccaatccactgattttaatattaatcgcaccttttaaatcaccatgttgaactgattcaatattatgctcatggtcatgtccacagctgcattccttgtgatcatggtgatgttcatgctcgtgtccgcagccacatttctcgtgatcatgatgatgtttgtgatcatgttcaccgttacattcttcgtgattattagaaacattataatcttgaccattttttgataaattgattacttctacatccggttcaacgcttttaacagcttcgacaatttttgattcatcaaacaaatcagtatctgtttcaacaaacatttttgtcgttgcgaacacaacactgcactctctaacattttcaagtttactaactcgctcttgaaccttttgagcacaattagcacaatctaaacctttcaaactatacttaagtttcataaataccctctccttactcaattacatgtttatacccagcgtcaaatatctgcttaacgtgttcatcatcaagtgaataatacatcaatttcccatctctcctaaatttaactaggtttgcttgctttaaaattcttaattggtgtgaaatagcagactgtgtcatatctaaacacgccgctaaatcatatacacacatttctgattcaaacaaagcacaaataattctgattctagttgaatcaccaaaaactttaaacaactcagcaacatcataaagaatttcctcttccggcaatgctgcagcaactttattaacaatagcttcgtttactactttatccatttcttatctcctttcgtatgaatatttattcatatgacaatatgattatatatccatatatttacattgtcaatcaataatgataaaatattttaaaaagtatggagggttcacatgaaaaaattactagtagtgattgattatcaaaatgattttgtaaatggtagtttaggattccaggaagcagtggccttggaagactatcttgcagatcttatcaaggaataccataataacaacgatgatgttatttttacttatgacactcatcaaaaaaattatttaactacccaagaaggaaaaaatcttcctgtggcgcattgtcttgaaaacactgaaggatggcaactatatggaaaaatccatgatttagcaaaaaatgataaaaaaataataaaagaaacttttggctcattagcattaggtaattatttaaaaaataaacaatacaatgaaattactttagtcggtgtcgtttcaaatatctgtgtaatatctaatgcaataattattaaagcagccttacccgaagcatctatcattattgattgtttaggaattgcaagcaacgacccccttcttgaacagaaatcaattgatattatggaaaatttacatatgaaaattattaataaaaaaagatagctgtattgaagatttaaaacagctatctttttttattaacatttcgatatgcaacaccacgagtaatccgtaataatttctcttcgccaggaaaatgaactggattattagggaacgtccgataaatttcaattatatcttttgcatctgcaactatttcttctaattgcataaaaccgtacattttaggcggtaacagataaattggaactgatatggtcgtctcctgtaaaagacgttcaacataaatttttaagtgagggcagcacataattatgtcaaaatcagcttctttttctttaacaagagaaaacggataaaattcaagataaacctcttcttgtaatcctttctcaactacttcttttttcattctctcagttacataactagaagagaatcctccgccacaacatattaatattttcaacataactattccttcctttataatttactattcataactattaatggccttagaattttaacttctgcaaatatttatactactatatatcttatcatataatcttcgtttccaacaaactaattgctttttttaggataagaacataattagttacattatcatagtttattagataaattctatcttgtatcactagctaaatgagagtatacttataaataaattaagggggttgtttaataatggaaatcaaaattgaaagagcgaaaactctaaaagaaaaaccaaatcaagataatttaggttttggaaattattttactgatcatatgtttatgatggactatacagaaggaacaggatggcatgatgcacgcatcgttccatacgcaccaattccaatggatcctgctacaatggtacttcactatgcccaagagactttcgaaggtttaaaagcatatcgtgatcctaacggtaacataactttattcagaccagaaatgaatgctcgaagaatgattaattcaaatagacgtatttgcatggctgaattacctgaagaaatgtttgtagaagcggttgaagcaattgttaaatatgaacaggattggattccaactgcaaaagatacttctttatatattcgtccattcatgtttgcaagtgaagctggtgttggggtacatcctgctaaaacttatacttttattatcattttatcaccagttggtaattactatcctgaaggtgtaaatcctgtaaaaatttgggttgaagatgaatatgtaagagccgttaaaggtggcactggattcactaaatgtggtggtaattacgctgccagtattgcagctcaagtaaaagcagaatctcatggttatactcaagttctttggcttgatggtgtacatcgcaaatatgtcgaagaagtaggaacaatgaatgtaatgtttgtaattgatggtaaagttgttacagcacctttagaaggttcagtattaccaggagttactcgtgattctatcatccatattcttaaagattggggatatgaagtcgaagaacgtgaattaagtatcgatgaattaatggcagctggtcgcaatggtaaattgacagaggcatttggaactggaacagcagctgtaatttcccctgttggtcaactttattataaaggtgaagaagttattatcaatgattttaaaactggtgacttgacacaaaaattatatgatactttaaccgggatccagtggggtcgtttagaagataaatatggttgggttcgtcacatcaaataaaactggagacactccagttttttcttataaatataaaaataagaacatcggtatgttcttattttcgtttattcataggtatatattcatatgtttctccaacatatttagcagcgggacgaataatccgtcctgaatataatttattttcaatattatgagctaaccatccaactgctcgaccaactacgaacatcaatgtatatagttctgttggaatacacaacatatcatatattagtccgctataaaagtcgacattcgcacaaacagtaattcctttacgattttttattgcctgaatagcagcctgttcaaaacgataatagaaatcaaattctgcttctcgccccttttcaagagctagttcgctacattgttgtcttaaaataacacaacgcggatcactaaccgtgtatacagcatgaccaatcccataaatcaatccactattatcattgtattgtttatctaaaattctttcgacgatctcattaatttgttcatcacttgcatctagaccaatttcattaattatcagtttcatttgattcattacagcaagatttgccccaccatgcttaggaccttttaaagaaccaattgccccagcaaaactcgaataaatatctgttccggtcgaacttattacaacattagtaaacgttgaattattaccaccaccatgatcagcatgcagaactaagcacatatcgagtacttcagcttctttaggtgtgaagtgtttatggtcacgcaataaatataagatattctctgcaattgatagatctggcctaatttggtgaatatataaactttctttgtcaaaataatgcactttactacgatatgcataacaaacaattgaaggaattttagcaattagattcaatcctttgtacattgttgatgaaggactaatattatctggatcctcatcatacgaatataacatcaaaacttcctgttgtaatttattcattaaatttttagatggaaacccaagaattttagattccaaataatgcggtggtaattcataacgctcagatagctcctttttaaaattttctaattcctctttgtttggcaaatagccaaacaagatcagaaaacaagtctcttcaaataaaaagcgttgatgcggttcgcgtttattgataatgtctgatactgcgattccacgataataaagctccccatcacagtcaactttcttaccatcaatttttttataccctacaacatcagcaatcttggttaagcctactaataccccagtaccatcctcgttccgtaatcctttttttacatcaaattttgaatataattcattatctatcttgttattactttcttttgctttttcaataaaaccatcaataaattgactcatataagcacccccataaatttaagtagttttattataacacttcttcttttgattgtatacaatctttgtgacaaattgtatacaataacaagttgtccaattaactttagaatcatttaatatattcttaagtaaaattaatgagatgattaattttaacttattgtttaatcattataattaagttaaaatattctaaagaggagaattatatgaaaataaataatcaagattatcatggtttatcaaccgctgaagttaatcagcgtataagtaatggtaaaatcaacacggtcgataataaaatcactaaatcttataaacagatttttttaaataatacaattactttttttaatattttaaatgctgctttactcggcttagtactttttgttggttcatataaaaatacactatttattttagtaattattattaatacgatcgctggaatatatcaagagattaaagcgaaaagaacgttagatcgcctatctattcttactacctcacacgttgaagttattcgtgatgatgaattaaaagaaattgatattgatcagatcgttctggatgattatattgtcttaactacaggagcccagattccaactgatagtattttaattgatgggcatatggagactaatgaatcactgctcactggtgaatcagatcctgttttaaaacaaaatggcgatactttgtattccggtagctttattacctctggtaaaggaatttgtaaagttattcacgttggggatgataactatatgaatcagattacacaggaagcaaaacgtttaaagaaacataattctgaattaaatcgttgtttaaataaaattttaaaatatgtaagcatcgttattttaccgattggcggtctattatttttaaagcaatttttttatggaaatcaaacatttaacagctcaatcgttagtaccgttgctgctatactaggaatgattccagaaggtttagtgctgcttacaagtgttgctttgaccttaagtgttttacgattagcaaaacagaatactttagttcaggaattattttgcattgaaactttggcacgtgttgatgtcttatgcttagataaaaccgggactattactgaaggaacaatgaaagttgaatttgatgttaaaatgagcaatgttgatattagtgaaatcgttggaaacttaatgcattctctaacagatgttaatgtcactgctcaagcattaaaagagcattatcaaacaaaaactaattttaatccatattttgttatcccttttagttctgatcgaaaatatagtggtacctcctattttaatcgtggtacatattatattggagcttatcagtttttatttccaaagggaaatgaagaattggaagaaaaatgtgttgactatgctagtgaaggctatcgtattttagttttggcacatactgatgaagtaatgagtaatgaagctttgcctgtcgatttagagcctttaggtattattgtgttaagtgatgtaattaggaaagacgctaaagaaacattagcttattttaacgagcaaggtgttgatttaaaggttatttctggtgatgatccgattacagtttcatctatcgcgaaacgagctggattgaataatgcccaccattatgttgatgcaactaccctttcaacttctgaagaaatagcagaagctttaaataaatattcggtctttgggagagtcactccgcaacaaaaaaaggctatggtcgttgccttaaaacaacagggtcacactgttgcaatgactggagatggagtcaatgatgttctagcttttaaagaggcagattgctctattgcaatggcatcaggaagtgatgcagctaaaaatgcagcaaatctagttttgcttgataacaattttgatgcaatgcctcatatcgttgatgaaggacggcgtgttattaataatattacgatgtcagcatctatgtttttgattaaaactatattttctgctctcatagctatttcaactatcttttttggtcaagcctacccttttgagccaatacaattatcacttatcagcgcatgtggtgtaggaataccaactttcttcttgacatatgaagctaactttgcacgagttgaaggaaattttttagaaaccgttttagaaaagtctttcccttctgcttttacaattgccataggagctactttaattacaaatattggtcttactttgaattatgatcctaacatgctttcaactgtctgtgttttatttacaggatggaattatacaatagctcttttaaagatatatagaccactaactaaatatcgcaagtttattatttattcaactcaattttgttactatatttcaatgatgatcgggcagtcaattttagaattaacaggcgtttcatttaactggctaatgatactattaggattaattgcgttttcatcaattattgttgacttgtctgctgaactatttaaatatataaaaatatttaaagaatttcttgaaaaacgtcgaaaaaagagattgtcaaaaggttaaggattttccttagcctttattgttgccaaaataacataaatattgatagaatagaataaaggaagaaggtatattatgtataataaaataaaattattggcacaacaataccaccaagaaacaattcaaactcgacgtgattttcataaatatgctgagcgcggctggttagaaatgcgaactgcttcactagtagcccgtagacttgatagtttagggtaccaagtctcagttggcaaggaagttatgcgtgaagagttccggatgggattaccaagtaaacgcctattaactttaaattacaatcgtgccctccttcaaggagccgacccctattacatagaaaaagtaaagaatggttttaccggggtcgttggagtaatgcacaacggaattggacctgttgtagcaattcgttttgatatagatgctcttagcattactgaagatgattcagcagatcataatcctggtaaaaatggctttatttcttgtaatcctggtgctatgcatgcttgtggtcatgacggtcatactgccatgggattaactgtggccaaaatactagcacaaataaaggaacaactacatggaacaatcaaattaatttttcagcctgctgaagaaggtgtacgtggcgctaaaagtattgctttaagcggaattcttgatgacgttgattatatttttgcgggtcatatttggcagcaggtcgaaggggaagattatgatatttatttgggaatgaacgaaacatttgcaacaacaaaacttgacgtaacctatcatggtgtttcttctcatgctgcaggaatgccacaattcggcaaaaacgccttattatctgctgcttcatgtatcctaaatcttcattcaattccacgtaatagtgatggttgtacccgtatcaatgttggtacaattagagcaggaacaggaagaaatgtagtcccagaaacagctaaattagaaatcgaagtacgtggcgccactacagaattgaataattatatggaagtttatgctcgggatgttattagaggagcagcattaatgcacgataccattgtagagataaacgagatgggaaaagcttattcgcttgactgtgataaaaaaatgatggatttaattcgccatatttgtatcgatcatttaggtgatattaaagttgccaaagaggatttaagcccgctagacggtagtgatgatttttcctatatgattgccactgtccaagcacatggcggaataggcacttatatgaaattgacaactgatctagtcgcttcacctcataactgtacatatgactttaatgaagatgttttgttaacaggaacaactgtctatagtagcattgcctactatttattaaatcaagattaatatttgtgatagaatcaagattctatcactttttaaattaaaaaagagcacaatttgtgcccttatttaaagaaatccataaatttatcaactgcagtatccacaccactatcaagatcggttttaaattgatcaaatcgaactttagcatcagctataatgtcatcaacttctccatctttagcattataaacttttgcagcgtattcttttgtgctgatccctaaatctctaattgaattatcatcgtcaacttctcccttatctgcagccatttctaaataactaccatgttcgtaaagctttttcgcaacctctttgtctttaacatcatcgatattatcgcgaatataatttactgcttcatttacatcatcacgattaactttatagtcactactaaatttatttttaactctactatcaattccctctaatccattatcctcatctgattcattagtggtagtattgttattactatctttgttagtatcatcattgtttgaacatccaacaatcgaaaaactcattgcaaataataacaataaacagcatattgattttaaaatacgtttcatatctattctcctttaacttatctatctatatttttcaccaaaattattttttttaaacaaaatatcataaaaatcatgtataatgaatttggtgatttttatgaaagaacaacaattagatgcattactagaaaatattaattatgaaataagtttattatccaatgcaagtgcctttatcaaacaagtcttttctgatatatcttgggttggtttttacctttgccaagataatcagctgatcttaggtccattccaaggaaaaacagcttgtacactcatcccctttaacaaaggtgtatgcggtgcctgtgcaacaaatcttaaaacttactgtgttcctgatgttcatcagtttcctagtcatattgcttgtgatagcgcaacaaacagtgaacttgttatcccgttgattatagataatagcttgtatggcgttctagatttagattctcgttgttttgcacggtttcaacctgatgaccaggaagagctagaaaaattagcactcataattattaaacatttaaaacgaataaaggaagaaacaaaatagtttcttccttttaactttttttatcaaatttttgtttacatttaggacaagtaattgtaatttgtccccgaccacgtggcactctaacagtttgcttgcagttaggacatagaaaatatttatgcattttatcatttttattacttttaataatattaattctttttttgacaggctggattaaagataaaaatttatcattttcagctcgccttttataaatattacgagaataggtcctaaaaatattaataattaaaattatccaaataattgttgcaagatatggattgcgaattacaaaaagatttaaaattaataaaattaatgcaaatattaataaaaaattgtttagttgatccgatccataacgacctgacataaagcgatacagcgcattttgaaacttattcatgttaaccctcttttcaaattatacattaagtataatttgaaattattaaatctttatgaattattttcattagtatcttttttcttatgttctttacgactacaatcgtatgtctctacaattaacgttttaaaaaattgaattaatgcatttcttgtatcgctgttcatatttttgatttctttaatagccgtaattagatgtgataatgatttttctgaaaaatcattaattttttcaattttagctgcttctaaaattgaaaatactgcagtaactgcatcctttcgtgttttactgtcgactttacttagccatgatttaaaagctgcatccatagtttggctatccttactcatttcagtagcacaaacaaattgtgttccttctactgaccagctaaagccactatgttgcattaaacctttagcgctacttttaactactattttttcttcaagattctcaagcattatcccgaatacggaactttctggaatgaatttttttatcctagtagaaatattgcggtaattatctgtatttagcattttttgattaaaaccagggccgtcattattataaatctcaataattcgtttagatattttagaattcacacaactagatgcataaactgctaaatttcctccttttgaatgaccaccaacacgaattttaacgccagatatcttttgggtgatatatatcctaaaaatttgataccacttcattttataatcacaatggcataaaagataaaaaagtgatttagaaaaatcgatttcagcaattttagccaaatactcaactgctctttgctgagaagcaactggaaattgataagtcatttgaaaatcctcacgccagcctaaaattgtatcatcagtgccacgaaaagcaacataaatactactatcttctaattgaaaagtaattgccgcaaattgttttatactttgatagtccagttcattaatataattagatagcagaatattttgataacgcggacatttagctaattcttgtaataatgtaattgattccttagtgaaagatatctcatctagtaattcttcaatattatttacttgactaaaattattagcaacatcttttaaacaataactttgttcattgggaaatgtgggaactattttatcaaaatcaacataaactaattcacttaaaatcaagccatcaatatcattaaatggatctattctcattgacagatcacctcgccattttaaataatcatatatattggacatttttgttccccctttccttttttggcattataccatatttaaaaaaaattatacaacttcatgacatttattgacaataagtttttgagacctataatgtttatggaaaggtcgagaaaaatgaagttattcaataaattttcaaaaaaacaaaaaattacctttatttcagtattatttattttaattattagtacagtttatttaatctggcaaaaaaataaccaattgttaacttttgtcaaagacccaatactagaaatcaaccatgagtttgattatcaaaaaataattaaaaatattaaaaatgtccaaacatccgatattaaggtcgacacatctaaattaaaaaatgataaaattggcagctatcctgttacctatatttatcagggcaaaaagttcacagtaaatattaacgtagttgataaaactaagcctaaatttgaaattaataatattgaaatagatgcaggaatggatgttgatccaacaatgttagttgataacattgttgatgaaacaaaaacaactatttcttttaaagatgcatataatttttcaaaaaaaggaaaagtcaaagtgacagtaattgttagcgatgaaagtaataataaatcaacaaagcacgctactgttacagttttatctaaagatacaacaaaaccaactatttctggtcttaatgatctaactgtcactttaaatggtaaggttgattatttagctggcgttaaaggaaatgataatcgtgatccacatccacaattgactattgataacaaaaaagtaagattggataaattaggtgattatattgtaacctatacttgcaaagataggtctggcaataaaatagttgctaaaagaaaagtttcagttgttgaaaagaaagaaattggagtttatgctcaaactgaagaaaaagttatttatttgacatttgatgatggtccttcaaaaaataccaaacgtattttagatattcttgacaaatatcatgcaaaagcaactttctttgtgactggtacaaaccaaaactataattacttgatcaaagaagcatatcaacgaggtcatacaatcggtttacatacttacagccatgattataaaactgtttatacttcagtaaccgcatattttaatgatttagaaagagttggaaacatggttaaaaatgaaattggctttattccaaagtatattcgtttccctggtggagcttcaaatacaatttcacgtaaatattgtcctggaatcatgagtattctagcaaacgaagtaattgaccgtggttatcaattttatgattggaattatggtacaggtgatgccggtggaaacaatattccagttaatcaaatcattgctactgctacagctggaaatgccaataatcaagtgattcttgctcatgatacagatgccaaaaataccacggtagatgcccttccggcaataatcgagcattatcaggcactaggttattcttttaaaagtatagatgacaattcttatgttcctcatcatcatattaataattaaaagtagttttcgaaattggctctagaatttgatttttcaaaagatggaacctatttcaataaaactatttttatttttaagatttattaagagattcttaggatttattatgatagaatttttaaaatagcgtgttatgattataattgttatgtattggttaattcttgctaattcattgcaaagcaattgtagttatattacaattagataaattttgttttttatgaggatgttatttatgggaaaaattaaaggtttaaataaacaagaagttgcaaagcgtattagtgaagggaaagtgaacctttcccctaaaccagtagttaaaagtaattttcaaattattatggggcatgtttttaacctctttaatgcctataattttattattgctgctgctctaattgctgttcaagcatattcaagtttattttttgttgttattgtcatttcaaatactgttattagagcgcgacaagaaataaaatctaaaaatatggttgctaaattaaacttgatcgtttcgccaaaaactaaagttattcgtgagggaaaaacgatttcaatcgataacgaagaaatcgttctagatgatgtagtttattttgaaaccggtaatcaaatcagtgctgattcaattattattgaaaataatgttgaagttgatgaatcacttttaactggtgaagctgatccaatttctaaagggcctggtgaccatttattatctggtagttttattttgagcggtgcttgctatggtaaggttgaacatgttggaaaagataactatgcaaataaaattactgatcaggcaagaactcgtaagcctgttagctctgtcttattaaacacttttaataaagttactcgttatactagttatttagttttaccattaagtattttaatgctctatcaggcttatatcattcgtgatcaaggaattacaagcacaatcgtcaacactgctacagctctgctagggatgcttcctaaaggactagttctattaacaagtgtatctttagctgctagtgttgttaaattagggaaaatgaacactttagttcaagaaatgtttagtattgaaaccttatcacgaattgatgttctatgtttagataaaaccggtaccttgactgaaggaaaaatggaaatcgaacaagtcattaaattaaaaaatccattaaatcttgatctggatgagattatgtgttcctttgttaaaggatctcttgataataatattacttttaaaacacttagtaactattttactggccctgcaaagtatgaaacattagaccgtatagctttttcttcagcccggaaatggagcgccattgaactagattcaataggaacaattattgttggagcaccagaaataattcgtcctgattatcaattatcaccaagaattattgagatgcaaaaaagcggcgcacgtgttttattaattggccatcacccaacattaaatatcttacaggaaactttaggacaaacaacaccgattgggctaattgttattaaagatcctattcggaaagatgctcatgaagcccttaaatttttcagtgataatgatgttgctgtaaaagttatatctggtgataatccagcgacagttagtgcaatcgctagtcaagcaggtgttgctaatgcagaaaaatacattgatgcttcaacaatcgttactgatcaacaattagaagatgcaattttaaactataatgttattggtcgtgctagtccttttcaaaagcaccagatgatcttatgtttacaaaaacataatcaaaaggttgcgatgacgggtgatggagtaaatgatgttttagcattaaaagatgctgatgtttcaattgcgatgggttctggttccgatattgcccgccaagtatcgcaatttattattattgatggtaaattacaaacattagtagaagttgttcgagaaggtcgcctagttattaataatgttacacgttctgcgtcaatgtattacttgaaaacaatttacacgattttactttcaatattatctattttaatgaatataccttatccttttattcctttccaaatgactttattggatatgtttattgaaggtttcccttcatttatgattttatttgaacgaaatatcgaaaaaccaaaagaatcaattggtcatcatgctatgcgtttttccttacctaacgcattagcaatagttttaagcgttgctggtataagattactcgcaccaaccttacaattgtcgttagcagaaactttttcagtcctatattttacaactgcttttgtgtctattcacatgatttatcgtatttataaaccattaaactggtatcgaggtggagttttaataattgatattattggctttatcctctctacaccgattttttggccacttttagaaatgcatgtattaacacctaagttaattcaaattatcctaattacgattgttattagcattcctgttttaatcatcctgacaaggagtgttagttattatcttaagaatctaaatagtaaaaaagctttatagcattaataagcctgttcaagtttttcttggacaggctcccatttaaaacaaatctatttatctaaacaaaaagatatatttagatacattactgtaccttctatatctatttttcatttaaaagttgaattaacttaatcacatcttcttgaatccgaggtggtaaatattgcggcttggctaataaaaaaccttgaagataatcaactttaagcttaatcacctgctttaattcatcaatcgtttcaattccttcagcaattaatttcatatcccgttcatgagcataattaacaatgttttcaacaattttacacttatcaggatcactatcaatattacgaattatatccatatcgattttaataaatttaggtgaaatcagcaataggattcgatcactattatatccacttccataatcatctaatgctaattctgcttgccattttttcattaattctgctttttgctgatgataattttcgtcaatgtactcaacttcagtaacttctaaaacaacattttttaaatactttgaatactccttttctagctcatcaatttttttattacttaaaatttgatttgaaatagaattaataaatattttacaatctttattaattcgctcatttcgtaaatggttggcaaaggtttcaagtgatgaggaccatgttaattcttcaatttctgctaaacgtccctcctctttagctatttttaaaatatcaaggggattttttaatgatggcataaatgatctcattaatgattcatatgcataaatagttccatctttgctacttataattggttgaaaataaaactgaattgctcgatcttcaataatagtatttaattcttctttactttcgcttaaaaaagaatccgcaatataatcattgagattaaactctgttaaattacctttacttgtacgtttgatcttatacattgcataatcagcataatgttggagtttttcaaaagattcactatcccgtggataccaggcaataccgcctgatgcattgacatgaaaattactattatcagccaaaggaataaaagccttgctaattgcttcctttaatttattaattaactgcttaattacattttcatcatcataaccataaaagaaaacaaaaaattcatcaccagaaatccgtgaaataatagtattttctggggtgctgtttacaaatgtttcagcagctttagaaatgtaattatcaccaatttcatgcccataattatcattaatgtacttcagattatctaaatctaacatcaatagtgctgctatttttattttgtttatttcattttcaaataaactattcatgatcctaataaatgctctccgattcaaaagtccagttagagcatcatgatcacgttcatattcaatcacattcttttcaacaattgtattagttacattctcaattaccccagtatatgcattatcatttaccaatagccgtagattcacaaaaacataattatcatcatcaggaattttgaagagatattcttttttgctataatcatgtgaaacaatatattgtttatagccttcaaatgtttctttaaattttgtcattgttaattctgaagtattaacatcatattttagtaaaacctcaaaaaagttttctgatataaacaattcttcagtgtttatattatattcgaaccctgctagcttaatacttgccatttgtaataaattagtgaatttcaaggcagtatcacgaacattttgatttagttgttccatcatatttgcaagatgatcaatttcagcaatatttgtacgtctgaaagaaatcttatttttaatattagcttttacgacttcatctgataatttttttattggttttgaaatgatataactaaaaatgaaacttccaccaattccaactgtcaaggttaaaaagattgcgaacatcaaaatcgaagtgattttatttgtaaatgcaaataaatctgaagtatcaactattcctactaaagcccagcgttgattactgtatggtgtattagaattataaatattcaaatattttaatgaactatataaagtgttagaaccttgattgatataataatcattctcagattgcattaattcagttgtaggacttttcgtcgtataaatatttccattcgttaaaatattacttaaaatcaatgaatcatcttgattgattgccaacaaatagcttccattaccttcatcaagtaactctgtactgggcaataatttgttcaaataatctaatgtaatatcaattccaacgacaccataaacagctccttgatcgttgattaacggtaatgagtaggtgaaagcctcattttcagaatctctcaagcgaaaactcccaccccaatagcccatatcagtactcgaaaattcttgtgaattactaattgcctgctggtatggagtatagaaaaaatcataatattttatgtttgcttttttaaattcaaaacgtggccgccatgatgaatcagtagcaatatttaaagatttaactacttcagttggagctcgttcaattaataaatccccattttctgctgaagcttttgataatggatcaagatctcttaaatatattccaggtttatcttcaagtcccttatccaagtcatgattattaaaaatgatataagcccctgtaacatgctgagagcgcattgttgaaatcaattgatctacaactgccaaaataagtggtgttgctgtttcagagctgtcatcaagatgctcataatcaacctttccttcactaacaagctgcttagctgtcgtatttatgtggtctgtcaattgagataaattggaccaattgtttaacatttcattttgaagataactgcttcgattaataactcgctgatcaacaatatctttagcgttctggtttaatttagcaaacattccaccagttgaaaggctaccaacaaggattgttgtctcgattaacactaaaatacacattactacaagtaaatatgaaaaaattgatttgtttttcatgattttacgaaacatcacaatcctccttctatagaactatttaattaatgattctaattggcttttagtattagtataccactgattaaaataagtatcattattaaattggctaattgcttgttctaaattcattccatttgaaagattagtaataactgtttcacgatcttgtttagctaaattactcattgttgtttctaaaacatttcttgcatcagttcccttttcaaaaggaactgatgtatacatattattatctgaaatcattttaagactagtatttaacgttttctttactgactcattgacttctacttcatcagtaatcttatcaagatcatttgcacttttggtaactggcaaataaccactagcatttgaaaaagcaatattttgtttatcactagtaaaccatttcaaaaattcaacagctgcctgttgttctttttcttcacttttgagaacaaccattcctgctccttgttgaacgacataatctttaccatctttaaatttagggcaagcaaatgtctccaattcaattgaatggctttcttcgtcatttaaaataacttctttaggaaaatatgtgacactcgaagatgaagaaacacaagcaagaatatttccgatttttatatcatcacttctaaatttacctgatgaactaaaataaccacttatgtaaggaacataataattatcccataattttttagcaatatctgcttcaaaatttaatacgattttattatcctttttactaaaaatatctgttgctagctggcgatagccaacgagcatataatttgcaaaagcatcacgaccaaaaaatgcttttccatcatttggagcagctgtcaaactatcagtccagttataatattgctctgcaaccttagtaacaccctcaattgtatttaaatcatttgttgaagcacccgtagcatttgcaaacttctcccaatctgttttattcaacataaataactctactgatttagccactggaaaaatttttaatgtatctttacttgaaaagtgtccttcttcaagataaccatcgacatacttagatagctcgtctttactaaaatatttatttaaatctactgcataacctaacttatccacttgataagctgtgtcaccatacgctgcaaaaatattcggaatatctgcagccccagcttttccattaattgaatctaagacatttctttctaaatcagaaattgttccttgaccagagccctcaacaattatccctttttctttaccgactgttttgttaaattcatcgactagacgattaaattcttcttgttgcgcaccattataataatgccatacttgaatcgtcgttggatcatccttgtctaataagtttttatcctcattactacatccagttacagcaaaaaacattaataaagatatcaaaactaatcttacttttttcatatgcttatctccattcccttatcccctaaaggataacacaaattggtcatttatacaatcttcacactttatcaatacaaaaaaggatacctattgatatcctctatgacaactccatttttccagtatacaattgataatatcttcctttttgattaattaattcatcatgattcccacgttctatgatttccccatgatcgagtaccatgattgcttttgaattacgaactgtagaaagacgatgtgcaattacaaaaacggtacgatctttcattaaactatccatccctttttcaatcaatttttcagtatgagtatcaatagaacttgtagcctcatccaaaattaaaactgggggattagcaattgctgcacgagcgatagctaatagctgacgttgtccttgtgataagttagaaccatcaccagttaacattgtttgatagccttgtggaagtcgccgaataaatgaatctgcatttgctagtttagctgctgccaccacttcttcatcactagcatctaatttaccgtaacgtatattatcttcaatcgttcctgtaaataaatgagtgtcttgcaaaaccattgataacgattgtcgcaatgctgctttttttattaatttaatatcaattccatcgtatgttatactgccagaatctaattcataaaaacgattaatcaaattagtaatagttgttttcccagctcctgtagagcccacaaatgcaattttttgacctggttttgcatataagtttaaattttttaaaataggatggttggggacataactaaaacaaacatcatggaagcgaacatcaccttttaacaaaaccagttctacatcaccattagaacggggatgacgccaagcccaaagtccagtattttcatgacactcaactagcttaccatattcattgcgaacatttgttaaagtgacacttccttcatctatttcaactttttcatccataatttcaaaaatacgttctgcacctgacattgctgccaaaataaaattcatttgttgggaaaattgatttactggcatcgcagtttgtcgaacaaaaaccaaatatgatgataaacttcctaaatccataatcccataaattgccataaacccgcctattacagcagataatgcataattcaaatatgaaatactgacaactgttggtatcatagttcctgaataagtaactgctttcgtagctgcttgtcgtaaagcttgatttcttttttcaaactcggcaaagttcacctgttcatgattgaaaactttaactactttacttccttcgaccatttcttcaataaaaccatttaaacttcccatatatttttgttgttgattaaaatactgcttactctttttactactataacgaataaaaataaacatcattaccattgaagcaattacaatgattgatagataaggatttaaaataataatcatcgtaattgttcctacaatcattataaaactttgaatcaacattgcaaaactattatttaaagcttctaaaattgtatcaatatcactagtaaatcgactcatcaactcaccatgagtacgctgatcaaaaaaactaagcggtaagttttgtatcttatcaaataaatcttcacgaatttctttaacgatttcttgagcagtttttaccattaattgattatatagatgacaagccccgacaccagttaaatacataattgccatcgttattattgcttgtaatagtccagcattattacctggtagaatgtaatcgttaataaccggttttaataaataagtacctaaaatatttgcacctgcactaattaatactaaaatagcaatgattatgagtgttcctatatgtcgagttaaataactagccattgcttttaaagttttctttaaatttttagggcgtggagttccgtttattctagccatattatttatctccttcttgaattttacataaatcttgatagatatgattacgatttgctaattcttcaggtgttcctatatcatcaattttaccatcagttaaaataacaattttatctgcatgggcaagtgatgataatcgctgtgaaataataattttagttgtcttaggcaaatagtatgctaatccatctgttagttttcgttcagttgctgtatctaatgcactggtagaatcgtcaagaattaaaatttttggtttctttaataatgcacgtgcaatacataacctttgtttttgcccaccagaaacattaactccaccttgccctaaatctgtattgattcccttaggcaatgcatcgataaattcactggcacaagcaatgtctaaaacttcattaagttcgtgatcactagcatctgctttaccccataaaatattttccttaatcgttccagaaaatagagtgtttttttgtaataccatagcaatttcatctcgaagatgttcgattccatatgattttatatcatgaccatcgattaataaatcccctgctgtaatatcatataatctaggaatcaattgtactaatgaagttttggcactacctgttcccccgataataccaacagtttcaccaggctcaatttccaaatttatattatttaatacatattcttttgcttttaagtcatatttaaaagcaacatttttaaatatgatttttcccctcgtaatctttatgtcacttttttcatctttaatatctatttcttcatcaaaaacttcttgaatccgatatgccgaagctagagaacgagttaacatcaagaaaacatttgaaatcatcattaaggaatttaagatttgcataatatagcttaaaaatcctgttaattcacctacttgcatatttccaacctgaatcatcccacccccaaaccatagaattgcaataatcgtcgaatacatcacaaattgaaaacacggcatattcataactgcataatggaatgatttacgtgaaacttgttgataattcaaattaacttcattaaatttagcttgttcgtaatcttttctaacatatgactttacaactctgatcgcaattagattttcctgaactatcgaattgacagagtctaaagctctttgcattttcccatataaaggacgaacttttgacataattataattaagcatgttgctagaacaggaatagctattaaaaaaacaacagctaatttagcattaattagtattgccatagttagtgcagttaacatcataaaaggtgctctaactaacggacgaatcccattacaaatagcgttttgtaaaatagtaacatcacttgtaagtcgagtaactaacgatgaagtactaaaatgatctgtatttttaaatgaaaattcttgaatcttttgatattgtgcttttcgcaattcatagccaaacccctgtcctgctttggcagcagtctttgcatacaataagcctaaaccaagcgacaaaagcgcacatataatcattaatccccctttgatcagaatataatttctatctttatttgctacaccgatatcaataatatcagccattatcaaaggaataatcaactcaaaaagagtttctaaaataacaaacactgcacttaaataaagatattttttatagtttttaaaatagccaaaaaattgtttgaacatcttattcctcctttaacaaggcgtcataaaggcgctctaagtaattaataaattgttttctttcttccttgctaaaatctctcaaggtaatatcttcacgctcatctagatatgcttgccatttaagaaaagtaatttttcctaattcggtaagttgaatatatacatttctcttattttcctcactataattccgtttaataaaaccattactttctaatttgtttagcataattgaaactgtagcaggctcaatatcacaacctttagtaatatctttttgtaaacattctcttttctgttcatacaaatatcgtaaaacctttggctgtcctggtgctaaattcagttcttttaaaaaaggaatattctttttcctttgtgtatgcgctgttttaaataataaataatataatgaattagccatctttcctcctattattagcatcctaactattagtatactaatcttattaataaagtctgtcaaggtatttactaaaattaaaaaccggcttctatttagagccggtcattttatatattttacttagtgtattatatgctgttttaatcgtaccatcgtattcctcagcaaaaacaatagtcatttcctcttttaaaataatagctaaacaatattttaatttacgattcaatcgtctatctaataacgccattcgtccaaataataaaacatttacaggatccagctgtttttttaattcctcgatttcaccatatttcacttcaataatatcgttataagaaaactttctacttttgaagataccatcaactgaaaagctattttctttaagatttaaggtataaatagcacgcttttgatattcagcaataccaccaatataattaagattatatttaaatgtttttttcattttcaaactcctaatcctgattaaaattcttaagtccttctaataaataattatgactcttaggttgtttacgtcggaattcttctaatttttcttgatcaagttgtgctacttctaatcgaagttcgcgagaagatattcttttcccaccttgccctaatacgattaattgttctaacgcatcagatgtggccactgtaatattgtatttacttgccaactcatgagttgcccgctcaatatacatatcagctgtttgtgcttctttagtatatgcgatataaatattatgatatttagtagttgaaccaatattatctttaaccttatatgcatcaaatactaaaatcaaaatacattttttgtaaccttgatagttgcacataatatcaattaatcgcattctagctgcgtctaaattatcttttgctaactctttcaattctggccaggcatgaataacattatagccatcaactaataaacattctggaatgtatttataacttgactcattaaatatttttttagttacttgatgttcgccagatctttgtttaactggtccataagtgcgtgtgaaaatattttctaactcgtcatcaatattatcaaatttagatttatcctgaatattattagcggtcttctttatttttttaaaaacaaatggtatgtgcatatgttgggcaacttgatcccaccttacattataaccagcaccatgactgcaaaatactgatcctgttggattttctacatctgcctcactatcatagttgaatgatttaattacttcagcctgattttgacatgggcgataatcacttaactgacaaattaggcgtccttttcctttagtatatctaacaacttcactttgataattttgcattttactgactggtgcacttccggtaataacagcaatgtcagtttgattttccggtaatttaaagttccctgccattgcctcaatatcataaatcgctcgactcagatattcaatcggtaattcaagtgaaaaatcaaaatacggctctagtaaaaccgattttgctgttttcaagccttgacgtatcgcccgatatgttgcctctctaaaatcaccgccttcagtatgctttaaatgtgcttttccagccactaaagttattttcatatctgtgattggcgagcccgtaagtactcccaaatgctctttttcttgtaaatgcgacaaaattaatcgttgatagttattcgctagaagatattcttgacaatttgtatcgaattttaatcccgaccctggtttcccgggttctaaaagtaaatgtacttcagcataatgacgtaatggttcaaaatgtcctaccccttcaacagcttcttcaatcgtctctttataaataattcttccataatcaaaatcaacttcaactttaaaccgctcttggattatatttttaagcacctcaatttgaatttcacccattaattgaacatgaatttctttggttctaacgttataattgatatgtagctgaggatcttcttgtgctaataaatttaacttttttaacacttgatgttgatcacaatcaggaggcaatttaatttgataatccatgtatggtgacaacaatggctgagtcgtattatcttctatacctaatccctgaccagcaactatacttttaagccctttaatcgcacaaatatccccagccatcacttcatcagttaaatgatacttattcccagaataaatacgaatttgatcaactttttcatcatttaaaagttgcgttttcacttttaaactaccgccagtaatttttaaatgtgtcaatttgtttccttgttcgtcatgacttattttaaaaactcgcgctccaaaagattcagaataatccttattctttatataattagtaaattcattaaaaaaattatcaatccgttccatttttaacgcagagccaaaaaaacacggaaataattggcatctagcaatttcattaattaacatctctttgtttaaggtattatattctagataataattcaataaatcttcgctatttaaagcaacactttcataaaattcatcattcaaattactaaaatcaaaacaatgttcatctagtcgttcttttaaattctgcattaattcagattgctcataacgactaacatccattttattaataaaaataaaggttggtattttatagtatctcaataaattccaaatagtttcactatgaccttggacaccgtctatcccactgattaccaaaatagcataatcgagcacttgtagcgtacgttccatttctgtcgaaaaatcaatgtgacctggcgtatcaattaaagtaatttggctatcatgccaatttattattgcctgcttagaaaaaattgtaatccctcgatttctctcttgaaaatcataatctaaaaaagtatcccgatgatcaactcgacctaattttcgtgttgttcctgttaaatataatatactctcagttaatgttgtttttcctgcatcaacatgtgcaagaattcctaatactatctttttcatttatatcatcctacttattttctaataatataattataaagaatattgctataattacaattgatattaccaatttatctaattcagcttaaaaatatgcttaattcaactaaaattattttgaattgttgtaaaagcatgaatcaatgactcatgcttttataatagtttaaacaaattaatgatttttgtgcgaccccaatataattagcaataacttcacatttaaccatcaataaaaaataaatatttttctcttgttcactcaaactttcaaagtttgcctgccctttagcaataactatatcggcacttcgatatatccttttaaattcattactcgtacgttctaataccgtacccaaagaattatcaccattactgataattgtagcgtattcatccattccaacaaaatatgcatcagcttcaattgaatcatttactactggttttcctcttacaccaaaatatatatcaatctccggattgagttttttaattcttctaattaataatttatcaagacaaatttcaccacaattatcacctaaatataaaagtacctttgcactttttatatcagttatcatttcttcaagctgattaattgctaattttaattgatcaatattttcaaaccacttatcaatgtctttaatttgggtattatagataggactaaaatcaataatatttccaataattgcatatttaacagccgtttcaaaagagttgatcttattttcaaattcagtactacgtgataagaaaagttcgttataatatttccgaagttcaaaatatggatcctcatcattaacttgctgcttgatcatttcaaatgtagcaccaattatctctggattagttttagtaaaatttagttttcccaaatactgaaatactcctcgataaaacatatcacgattttttatatttgtaatattggccactttaataacttgactgatcaagcatggtaaacaattttcatttattttcattcgactcaccctcctttagcatagcattcttatatttaaataaatattatttccaaaaaatggaaattctattttatcaaatttttttgatatttcataaaaatcaaatcaacaagacattgcaaagtatagttatataaatcatgttttattggaaccaaaataacttcattgacatattcgagctcctgcactaaattatttttagtaattacgtaaacctttgctttactactttttaaataatcataagtatgataaaaacgtgaatagccatttttcatgacatagttaccagaaaagctaaaaattacaattaaagtattactatctgcacttttaataaaatctagttggtcttgaaagttagtgtaagaaatgcaaatttttccccagccaattaaattatactgtaattcttttgctccattatcactatttaaaattccaaaaattgctatttttggatatttgtaaaaatcatagacaagtttatccactcgactttcatcaaaattctgataaaaatatgtaatctcctcagtaaccattttctgatatactctataatcaattatttctctttgtaaacctgtatgtcgcttttgctccccgtgatataccaaggcttctttaaaatcagaaaaagattcaatccctaacgatcgtacaaatcggcttacttgcgatattgaaacatttgtatttttcgctaactcactaattgatagactattaatattttcgtgatttgctattaaatatttagcaatatcacgatcaactacactgttgtgagaattatttattacatttattaacattgttgtcaccaaattcatccaatttctcctattcataattcaataccaggctttactattgttttttataaaagtaatttcattttgataataattaatctcattattttttgaaaagctttatttccagccaatacctcatgattagtcaaattacaaagttcttcgattcaacatatcccccaaataaagagattatctggtataatcattccgtaagctttaaaaaatatttttattctttcttttctaaacaaagtatcatttgtcttataatctcttattgttccatccgaattagtctgataactagcatcattgtgacaatataatctgtccaaacaattgcatgacaattaaaaaagttgttaccagatacatattcatgcaaaaaagataatatctcacgattattttcatcatcgcctaaaaatcttggaactctattacactttttaaattctaaatattgtgaaaaatcatggatataaggtttccaatagctgttacgatagattctatcccctttcttttcaatagtttgatttacgtttccatttaacctttctatttctttattccatgtaatataaatacctatttatcattaaaattatcttatcatacaatttaaaaggcaacaattaaatgatccatatcatttctatttacaagctgcgatatggatcaataaacataaatttagtttttatccgctattttttaaatacttaattaatatgttatcaataactaatgaattatccctattaggattaataattattgcatttttctctttaaatcttttcattaacataaaacaatcataaatactcaaagtaacaaaatagcgatattttgaattgaataaaacaggactagaatatacaggtaaataattttgagtagtttctccagataaattatctaaaatcattattagatcatcattggggatctttagtaatttttgttttgaaatcttaattgtcgaaggcatataaattggttttgattttaaataatcaagaatatcttttaaacgattgagttcaatatcatgattgtatgcttttattagctggtttaaattatcattagtttctatagtcatatactcaccgactttcaaattgattttcaaggatattattgtaacatatctaagcttataaagaaacgcgttattcaccttttcttatacattatgtttaatactaaatgatacgcgactaccttgcaatcacagagtaattcacaaattgtgaattacttgtgcatattcttaaatattataaaaaatgatgatatttaaccatcatttatatttttctaagattttattcatttcaagatcatcggtaataaatttacaatcaggatcacttttaattgatgtcacaagcatatttttcatttcttgaacaaaggtctgatcaattttttttgctgtaatatggcgatataaaggagaagtattgatattccatcctttattaattgcattgaacatttcttttaatatttttaaacactctaaccgttttttacgatttatacataattgaaaatgtgcagtataactagaatatttccataatccaaaaacttcatgcatttctttatatatatcggcgattatttcagcatcatcataccgctcttgtttaattgcaatctccattaaagttaaaagcatagttggaatctcattaactgtcactaaaagtttttcttcttgtaatttagcggctgcttctaattttgcttgagctatgtagagattgactaacttttgttttttatctattaaatgttgttctggtaattcattaattagcttctcagcctgttcaagtttcccttgattaatatacttgttgatcaaaactgcttgagcttgatttttaatcattggattgtcactagttaaacactgttccaataaactgtcaattttttgctgatattttatagcttcatccatctcgtttaatgaaagcaatccttctaaaacaactgctacattaacaattagattatcacaagttggatattcatttattttatctattgcaattctatatgcctgctgaaaatctttgattgcagctaaatcgtttaaaaacaacacaacttcataatctgacaaatcatctttaaatgacaatagagtatttaagtctgtttttaggattcttgctagagctggtaaaatagtaatatctggataactaatcccccgctcccatttattgactgctagcgtagtaagatttaaaaacttggctaattgctcttgtgtataccctaaagctaatcgcttttctttaattatttcattaattttcattaattttcacctcattatagtaatataataacatatgcattctaagatacaattgaccgttagttactattgctgggaaaaaataaacgaattgttaattaaactgttacttcctcgctactttgaattacttttaattctttacgtttataaatccatccaccaataaagacaatattcgcaaaaagccacgctaatggatttgcaaaacaaattgcattaaaaccaaatgatgaaacaaaaaagaaagcaacaatacagcgagctatcatttctgcaacaccgccaaacattgctaaaaaactataacctaatccctgtagtaaattacgcaatataaataaaatacataagatataatatcccatcgaattaattaacaaatattgtttaatttctgccataataacaacttctttagcatcgataaataacaatgatagataatcagaagtaaagtaaacaaatataaatacaatagcacaataagcagcgccaataatacaacttactcgtaatccggcgaaaatccgtcctattttatttgcgcctaaattctgaccgccatacgttgccattgttaaccctaaagtttctaatggctgagtcaacataacagaaattttaatcgcagcagtaactgcagctacaacatctgaacctaaagtattaacagcagattgaatcacaacactgccaattgcagtaatcgaaaactgcattgccatcggtaagcccatttgtaataatcgaatactgtgttttttactgaattttttatcatcatgttcgaaagttaaaacgtcggttttctttttcatataaatatagcaggctgctccagatagaaattgggcaattactgttgcataggcagctcctactgctcccatatcaaattgagtaataaaaatcaaatctagaacaatattaattattgatgataaaatcaaaaaatataacggtgtccttgaatctccgattgctcttaaaatacttgataaaatattatatagcattgtggcaaataatccaataaagataaccacgatataatcatatgcctgctgataaatatcacttggtgtttgcatcaactctaaaactgatggtaaagcaataacagtagcaattgtcataattgctgtaatcaacatacataaataaaatgaattaactatgtattttttcatgtcttgtatttttttaccaccaaaactttgggcaattggaattccaaaaccactacatataccaattccaaaaccaataatcataaagtttagtgatccggtcgaccccacagctgctaaagctgttttcccaacatatttcccaacaataattgtatcaaccatactataaaactgttgaaaaatattacctattactaaaggtatcccaaaagcaataatcagcttaagaggactacctgtcgtcatatcctttttcatcattttccctccttaaacatgtttatttattatacattattttctaacaatgttaagaaaatttataaatatgaaaaactatttatatcaagtaatcactttattaaaaaatatagtttaatacatttattgactaaaattgacagtatctttaatttattatatattcatttgcagaaggtaatatttatgttaatatttactgctttattagatagaaaaaaaagaaaatgagtttattaacaattaaagatttatctcatgattttagagataaaatatgatataaaaatgtaaattttaaagtttttaaaaatgaacatatagtcatcttaggagccaatggtgctggtaatagcatattaatgaaattgcttaccggtgcttatttaccagagtatggtcaaattatttggcattctaatattaaagtcgcccaccttaatcaatatgctactcttaatcaagaataaataatcaaagaatatcttagtcctgtctacaatgaagaatattttttagaacaaaaaaatgctaacactgtatcaaaaaaagaagttttaataataatgaagaacttttgactttagctggtagatatcaagaaaaattgattaacagtggttattatgctatcgatacttcaataaatatggtaactgcaggacttgggattaatctaattggacttgataaaaaaattaataaaatcagtggtggacaatgtgctaaagtgattctagctaaattgttattagaaaaactagatgttttattattggatgaacttactaattttttagacactaaacatattaattagcgagttgactttttaaataattttatgggcacctatattgttatctcgcacgattttgattttctagataaaattactgattgtattttagatattgattattatacaataaaaaatatcgtggaaaatattcatctttttaaaacaaaaaacgtcttcgcactgattatctaagacgttatcaaaaacaacaaaaacatataaaaaacgttactaggtgaaattattctgatatcaggaacctttatttttaatgatcaaataaaaattgcttattataatcaagatttaatttggactaatgattatcaaacaccgttagaaatagttcacgatagtcatcctaaattaggcattaagacaattcgaaccaatcttgcacatttcaatattacgaccgatcttattgataaaccaattatccaattaaatggtggtgagcaggcaaaagtaaaattatgtatgttgctattattactagccatttattgattttagatgaaccaactaatcatctagatcaagaaataaaaaaagcattggcaaaagcaattaaaaattattctagtagtgctattttagtttgccatgagcctgatttttatcaagaattagttgatcacataattaaaatagaaaactgtaatttctaataaaaacctacatagtagttaatgatctgatgcctctttaatattcagcgtttcatttatttacacagtctgctttagaagtacataccataacatctactagtaggttttagatttattaaatttgaaaattttactataataatttttttcttaattcatcaccagattcaggatgtaagtaagcaggcgctatatcaaaaacagttttacatccatgttgaccctcttgatacatccgatgcgctgctcgagcatatgcaactaatacacttgacgtaaattccggatttgaatctaaggttaatttatactcaattacatgtttgttttcttgttcgaatccagttgtaccacttcttaatacaacccctccatgaggaattccttggtgatcacgtaataattcagcttcacttataaaatgaacagtagtatcatagtctgcaaaataattaggcattgtcttaatttcttcttctattctttgtaaatcagccccttcttcagcaacaacaaagcattcacgagtatgtttttgacgtgttactaaagttggattctccccattacgaacactttgaagagcagcttctactggaatagtatactgtcttgcatccttaacttcgtcaattcttctgattgcatcagaatgtccctgactaaccccttttccccaaaaagtataatcatgaccctgcggtaaaatagcttgtccataaagacggtttaatgaaaataaccctggatcccagccaacagaaataatacttatatgtttattctttttacttgcctcatcaacattagcaaaatgttcagggattttagcatgtgtatcaaaactatcaactacattaaaatattctgctaattctactgtttgttttggtaaatcattggcactaccaccacataaaacaagaacatcaatttgatctttcatatcataaactttatccatactataaacaggtacatcactatgtgtttttactgatttaggatttcttcttgtaaaaaccccagttagttccatatcttgactatgtaatactgcacattctaccccacgtcctaaatttccgtatcctacaattcctatttttatcatgtttccactccttatattttttaatattttatcattcttttatcaaaaaaacacgaatatgaaatttttcttacatcaatatatttttttctcatatttaaacttctactattaaatatatttattttggctactaataactattagctaaaaaggggaggaaatgatttcaacaaaagaaaaaatattattagaagcactaactttattttcaaaaaatagctacgatgcaataactgttaaccaaattgctcaaatcgttggaatcaaggctccatcactgtataaacattatcgaagtaaacaagaaatttttgatgcaattatattaaaaatgaccagaatatcgcctaaacaagatatgaaccgtttcattaacatggatgaactggaattgatcaatataggtaaaaatatgtttacgtattttcttcatgatgtggtgcaaagcaaatttagaaaaatgcttacaatcgaacaatttaaaaataagaatttagcagaccaatatatcaaacagtattttgattattccttatcataccagcaatatattttttctattttaactaaacaagacatactaaaaaaacgaagattcttatattattgccctccatttttatggaccaatctattttcttatttcactatgtgacggcgccccagaacgcgagcaaaaagcaatagatattttagaacgtcatattaggcaatttaatcatgtatatattaattcaggtaggtaattatgaaaatatacaagcaatcaaaaaatatgatctacggtaaaatacgatgaatcaaatcagagtcttttctagcggctttttattcgtatttgctatatattgtcttttaaaaaaccctaatcttccttttaacttaacctcttgggtatatcttttaacaactatctattttacaatctttcctattaaagatatgatagctgcatttaacactaccctatataaaggtcgtcagttttcaaaaaaatactttcctaataatcagttagattagataaactttaaaaacatcgttcaagaatataataaaagagctttttggttattggttttttagcttattttcctattgattccaggatttttatatttaacagggtatctagaacggatctggattttcgttttctttgctctatctaacttctctgtattttttgctatttttggctggtgcccttttaattctatttttattaaacccgaatgctgtatggaatgtcatattatttatatgattttaaaattaatttaatcaagctttgttttacttaaaaattattatagaatttattttatattaataatttccatgagtattttgggaatatcatcataatcatcgatccaaatgacatttatccccaaactattaaaataatcatttcgattttttaaatgaaaattttgatagagtaaatatgcattactatctttactcattgaatttggtaattttatatcttctttttttagaattgcataatgtttagcctcacttttatcataagcaatatctaagagtcttctcatatttggatcagacaatgaacacccgatgaataaacaatttttttctcttaatgcgttgatttgttttatatttgaccaattatatacatcattatacattttatgatattgttcttcagaaaaaataattctttctaaatcaacttcatcaggtgtagcctctttatcaatatatccatgtacatgataaatattgacataattttgattttgtatttcttcataattagtaaatttttgatatgcaatatatttttgttcaaattttctttctaagagattatcaaaattaaaggtaataatatctttaatgtagacacaattttcatatctgatcaaatttgttaaaacttcaaataaatcattattaatattaattgatttctcgttatgataaatagattcttttaataattcaagatatatttctggctcgatattttgcttgatgaatctagtttggcttattggcgaattatcactattaagttttgctattcttgctaattcatcaacaatgttatcatctaaatttttctttgattcattacgaaacctatttactaaaaaactagctactaactcatcccaagatggcatgtttgctgacattgatacccctgcacctaaaaataatgctaccttatagttatgatatttttttgataattcttttatgtacttatcattattagctgcaatatcatcacaattctcttcaatgatatctatattctcttctaactttgaagtcggaatatatacttgattatttcttactgccaaaacaaccgctttatcatcaatgttttctccattatatatatcactgattttccaaagtcctcgactaatattcaatattagcccatatttttttagatatgttcttgcccatgatgatctatatgaaaattcagattgcttggtatctttatgttttaattttaaatctaactcgcctatatttaatcgactaattaaagtctcatcaatttccctgattgacatctcttttttcgattcatataaaatctccaatgttgggataattaaatcactaaaatccaccattacgattccccctattactaatatattagtttagttatcttttaaaatatagcaatttcaaatatacttaagctttgattgcccatctcattttagttgacttagctcggctattgatatggcattcttctttacttggtctaattacatttctagcaacatctctatatagtccaagatttttcatttctttaaatgcttttttaacaattcgatcttcaccagaatgaaatgttaatatcgccactcttgcacctggtttaagaatcgttgggagtttttccataaactctaaaagtacatcgaattcactatttacttcaattcgcaaagcctgaaaaactcgcgctgcagattttttcactgcatcttttctttctttttttggaataaaagataaacttttttcaattattttatacagttgtgttgtcgttgtaattaattggcctgattttaagtatgaatcaatatttctagctatttcttttgcgtatggctcatcagagttttcaataaaaagctgctctaactgatctctatttaactcttgtagcttaatagatgctggaactcctttttgaggatttaatcttaaatctaaggggccctcttttttataggaaaaaccccgttctggattatctatttgcatagatgatacccctagatcagctaaaacaaaatcaaacaaacctacctcttttgatatgatatcaatgtctttaaagttacaattttttattgttaaaacatcttcgccatatcctttacctaataagcgttctttagtttttatactttcaattggatcaatatctaaggcatacatatgaccagtatgatttaaacattcaagtatttttaaagtatgtccgccatagcctaaagtacaatctaatcctatttgcccttcttgaatatctaaaaattctagaatttcatcaaccatgatcgataagtgcatacctactggcgtgctaccttttttaattactttttcaattgtttctggatataattctggatttaattctttatacttctcattgtattttttaggatgcgttcccttatatctaacccttcttttatgtttaggttccataattagattcctctcttttttagctactaattttttatttactaacaactatcttatcatcattagatagtaaatgtctaggatatatgcaaatcatctatgcttactgagataatcaaaaatatttattaagtaatttagaaaattttatataaaaaggataaaatgttttaaaactaaccttttatcctttcttcaaaattatcctctttatataattttttcatttctactgcagtattattacccaaataaaatgcaatgggtagaactctcaatttttttaattttaagtaacgattttaatactctttaaattcctcatatcaaaatttattgatatcttttaatataaaacagcatatttatacaacactttattatatatacaaaacttataattgattatattttttactatttcctttagctttttcaacaggatatttcttttcagtctttttcaatttctttaatactatatcttccaaatcaacatctaacttatcagccatcaaaatacaataatttaccacatcagccaattccatatactaatctttctatcttttcatctattttatcattatatacatctaatagaaattgttcttttgtttcttgatacactatcataacttcaccccaaatttaaaattatttatttaagtatatcatatattatttttttaataattattattaaaaattcctacaatcatattaatcaactaaatcaaatcataagtctttgggttatgggttattttctttatttgtgaaaacctactatatgatttatattcattttaattttgaatagctataaattatatgattattttctctatatcttatttaccactacgcatgcctgcatgatcatctctcatatatgttacaaattcaaaaattcttaaaacttactaagccgtattcatgatgaaaactatcttaatcatattaaatatgtacaaaatattaataacagctgctgttttgttgaaagtatgttcattatattataatgataatgtggttaaaattttcaatctagttgtgccaaacttttgataagtcaccttgcaatcatgaaatcaagaataattcaataagaaaatgctttaatatcacacattttaatccttagttaccgctttatacttgttgtttttttattttctcaatttattaatatttcttcaatagatatcaatgcaattaatcaagaaatgtgtataataaacaatgtattatttataggaggttttttatgatacttgaacaaataaatccggatctacttactttagctaaagaatctgatacagttttacatgatatctacgaaaagatcgactctatttgtctaacaaattctaatcgaatcttatctgcttttattgaaaataaagtctcttactcagattttagtgatatcaacggttatggaaactatgatgagggaagaaataagattgaaaagatttttgcaactgtccttggttgtgaggatgcattagtacggcctcaaattatgagtggaacaaatgctttatacataactctttcagctttattgaaacatggtgacacaatgatttcattgtctggggctccttacgattcacttcaggaaatgattgggataagcggagattcaagtcagtcgctaaaagctgctggagtgaagtatgaacaaattgaattaattaatgatgattttgatgatcaaatgatcattgaacgcttaaaagaaaagaatattaaattagttgaaattcaaagatctaggggttattcgcatcgtaagtcgttatcgatagcaaagattgaacggatcattaaaaagattcgtgaagtaaatgctgaagtaattattatggtagataattgttatggcgagttggtagaaaccaaagaaccagggcatgttggtgctgatattgttgtcggatctttaatgaagaatcttggtggcgggattgctccaactggaggatatgtagccggtaatcaagatttagtttatatggtagccgaaagattaacagctccaggaattggaaaagatttaggggctaatttcaatttaaacaatgctttttttaaaggaatttttatggcacccaatgctgtaaaaaacgcattaaaaactgctatatttacagcttatatgttggaaaaactagaatattcaaacgtatctcctcgctatgatgaaccacggactgacattattcaaacattagaacttaaatctaaggagaatttagtaagctttactcaaggcattcaacaaactagtccgattgattcatttgtccatgttttaccagctccaatgccagggtatccttttgatgaagttatggctgccggcagctttactcaaggcagtacgattgaattaagtgctgatgccccagttattgaaccatataccttatatctgcaaggcggtttaacttttgagtatggaaaattatctattttattagcattatcaaatatgaaaaggaagttggattagcaacttcctttttgtccaccatcaattcgaattacggtattattaataaaatcagcttctttgcttactaaaaactttactaaataagctacttcttgaggatcaccatagcgattgaccatgattttttcaacttcttcttttaaaaattgctcatcataaccattcagttcattttccgtaccaatgaaacctggagcaatgcagtttacattaacaaagggtgcaaattcaaaggcaagattatgtgtcatagaaatcaatgcagctttagatgcatcataatcaatacacatcggataataggtattaataccattggtcgaagcgatattaatgatttttccatattcttgatcgatcatatggcgataaacacgtttactgcaattaaatgctcctactacatttacatctaatgtttttctaaattcttcagcattttttaaatgaaataaatttgataaatctacggctgcattattgatcaaaatatcaacgccaccaagttttgactcaatcaaagataccatttcatctactttatcttccttagaaacatctcctgcaatagccaaacaacgtactccataatcatcaataatcatattttttaatgcctcagcttcttttttagatgttaaataattaattacaatatcatatccttgttctgccaattctaaagcaattgctttgccaattcctttagcccccccagtaatcaatacaattttattcataattttaaaaaagagcttattaagctcttccagcatactttccatcagttgtaaacacaacgattttttctccagtatcaatgaactgaggaacccgtaatgttaaccctgtatcagtaacggcatcttttgtctggttagatggtgcacccttgatggctggatccgtttcaaccaccgttaattctactttttcaggaacagatactgataacaataacccgtcaaagaacattaatgaaacagttgaaccttcaataatataatatttattgtcccctacttgatcctctgccaattcatatgtttcatatgtttctagatccataaaataaaaagtagcatctgcttcatatgaatattgcgcatcttttcttgaaatatttgctgcctcaaacttagtcgaagcattaaagtttctttcttgaatcgctccagtttttaagtttctcatctttgtttttaagatggcagcccctttacctggttttacatgttgaaaatccataacttgacaaggatcaccatcaacaatcaaagttaatcctgttttaaaatcacctgctaatatagccatattttcactcctaatcttgctcatattaatatatactttattctatcaattttaacatcattcctcaagacacattatgatatttgtgcttgtttttctgttgtatgttccttaatatacctactccacttgatataaccatatgttgtattagtaaaatagcctaattttagaactaataaaacatattgtcccgaaataatatttataacggcttcaagaaatgcacaaatataccatgcaatccactgctcttgcaacctaaagaaaataaataaaccatttgcaatccctactgctgaggcacaagcatcaatatagataatgaatgtttctaataattcattgttgtagaaatccgtggcaatatttaaaccactaataagatatccaattacaaacgtccaaacaatgattccgatgataactaaaacttcctggtatcctcttagttttcttactactgttaattcattttcttcatcatctttatgttttgaccaatttatgtaactaataatatcaattggcagccagaaaaataatgttgttgccattgtagcaaatcgatacattaatactacacatatagcaatttcaacaatttcaaccaatattgaaacaaggaaattatatcgtgattgtttagaaatcaataattcacaaagaatatttaagaatgtatccaataaataaagtagcataatgataattccatttaccccattagcactttcttctgggaaaactacggaaaaaatcgttgctagaaccatgatcgaaataaaccatgatttttcataggttgtaaattgttttgcaaataacatcataattaaaatggataacatcaagattaaagaagcaatcccaaagttaaataatgaagctaactcattagctcttacttgtttgtaggagtactgtacttcttgatcgtttatattttggtgatcaaaatataattttgtcccattttttgtttcgtattcatatgctgtaattgtcttatcatctaatttaacatagtcttcatatgaataagatacaattagctgcttgtcaccatttatataggtaacatcacaaatcgtgttatcttcactgtagtcttctaagtcagtatctcttgtcatctggatactttgtttaaactgtatatcttcaatattagcattaatatcaagcaagccatatccaattgatataattgaagcaatacataatcctattgaaaatattacttctatcattcttaaccttttgttaggttctatgtttactttaaaaaatttaatcatatcaaaccttcttcccctatatacatttttaatgcttttacattataatatatttttataaatatgaaataacttttttataaatagtaagcataaaataatattgtgtattgaaaaagtcaatattctttgtaaccaaagaactcgacttttacaatttacatctatttattcttgaaaattttcttttataaaaaattcttttcttcttaaactattatctaattcaccaaattcaaatttacttctgacttttgaaaaatatcttcgcaaccatcctgtcaagtaaatatcttcattttttcaattttcaaaatagcttttggaatcatctatgttattcaaataaaaatctgacaaataacgttttacagtacatatttttatttcttttgaatattgtaattttctacctatagtaagtaaaaacctcctatagtcagtgtttaattatttacaatgtttactggggcatcatatcatctaaaggcttttttacactctatttactattcaaactcccctaccgattcaattgtaatcttgatttcgatattagtatagcacaaaccaaatcaatattgaactgttttataaaaattatttacattattttatagtatttgtgctcatagtgtgttcatttgaaaatcaaattcatattaattaaaacataatctcctctaattgaggaaacatctgctcaacacactttaatatttttctaatttgatctcccgttccaccatattctcgttttaacttagtaccatcgtcaaattttatagttactacatacgaggtgctatctgtgataaacaaataatcatgttcttctttcaatatttgggaaatttgatgaagcatttgattgtaagtatcaataaatttctttgaagatgaagaatatttccatttgtaggtttcatcatctttagaattatgttttttcatcttatacgaataagagaacttataatccttaacaatcaaacgactttctctaattgattcacccatgaaatcaactagattagatttaatatttatctccgcaatatttgaattgttatcattgtaagatttgtgcatttttaacatctccatttctaagaacagttatctacaacaaacagtatttgaacaaattttcatatatctaatatcaaaattatttaattctataataatccacctaaaataaaatcaatatcttctttttcagttgaaacttcttctaaaacattgttatcaaccgcatctaacattctttgttctttaaatgataatcgttcataaattcgttcatctaaagaatattcatcaccaaatagattatatttcatactcatataataatattgagtatactggttattaggtaatcctaatctgtgaattcgatctttagattgtaataaatgaactaggttataactatattcaaaatatattgcatcatggcaacatttatgtaaagaaacagactcagctaaagtgtgcggatttgtaatcaatacatcaatttttccttctttaaataattgaaccaatctatttctctcttccggtgctactgatccattgattacacaattagtaattcttgcttcagacaaatcttttgagaatctattcattgaatcaacaaatatacaccataagcaaagatttttgttttgtttaactagatttctaatttgttctattgtagcgttgtattttgatgttctctcaatcgaattaataagttctacaatatcatcgctataatcataataatctatatcctctgaaaaatcatcgccatccagaatatattcgtattcagataaatctagtttttgtaataatagtttaggatttgattccatttgcaaaattctaatgattaatgctagtggattttttgcatatcgtgcttttagtatttgcaatagtttattctctaaacctgtggcatcactcgtattgacaacatcttgatttgcctttggaacttgaagttgatcttttgttgttctacaaaagaaaggatatatagcatcattaacagctttaattctattacctgataaattctttaattcttcaactgaaaaattgaaaaacgaattatattcatcattaaataatagatgtaagttattgtaaatatcacaataagaatttggtattggtgttccagtcatggtgattactcttgttgcttttttagcaacatctaaacaatttaatgccattacgcctgtagttgattttattctatgaacctcatcaaaaactagtaatactttctcattaattatttcttgtaattcatgttttaatccaccaactaaatcataattaatcaatattaaattatacttcttctcaggaaaaactaatgcatcttttcttttttgtaaagtattatatctagggtcgtgtaaacctaaataacgtaatggcatcttatctccgaaacattctaaaaattcatcaatccaagatacaaaagagtttaacggaccaatcatgacaattttatcgacaccttcgcatttattcatataagcaaaagcaccatatacagaggatgttttccctgatccaggaactgaaaaattgctagattttctcattgtcgccataaaaaacgaatcccacatttgttgttcacgtaattgacgtgacattgctgtattaacaatttctttatatgcttcaagtttatccaataagtagctatctttatttttgatagcaacacctaaatttcttcttttatcaatatatatatttctatctccaatatatttagataatcgttcagtaacatgcatatctaaatttaaacttttacaaaactgtttcatcttatcaatgattctttgatattctacataaccataattttctctaaaatgaagatttttatagttatcaataaacgaaacatatcttcttaaagatattctatatttcggactagatgttagaatatctttgtcatctagtttattaaaagcaatcatattgtcatccacataatccaatataatgcaattttcaagcaaatggactttatcaatgatgatttttcctttgttataagacataatttttgtttgtaatttatcaggaagtgtagttacttggacaccttccattttattttcccagagcttattaaaatagctttttgttttttcaattttcccagcatcaaaatcactcgcaagccaactacaagttaaatcaaatgattcgaaattatctttaatagctgctctagtttcgttgttagaacctctcatacatacttcatttccataatcatcaataaatacagcacacttatcatgaaagattcctttttttgtaaaggcgattcttatttcaattactcctttagcaattaagtaagatagattggataagttcttgatatcctgtaaagttaaataatcatcaaactcatccaatttactatcgataaaagattgattaatctcataaccatctttaatttgttgaaaatcttcatcagatatttcattagataaaataagtctatattttccttgattttgctcaaatacctcaagtccttgagagtacaacgataaggccttccccgaaaaataagcactagctctatctacatatttagaattcctaaacgctggaatataaaaatcattataaacgttatcttcataagtattatatgttggtaaaaactcacaatcattcagcatttacaatttctcttaatccttcaacagcttgttccatctcatttaaaagactttccatttcttccaaatgttctaaactcatttttggaacaatatcaggatttattccttccaacatttctaatgattttcttaattgttttaatggtttttctttcaattcgccttttttaagtttctcttcatacttctttacttcttgtgacattttatatactaattggctttcaccatcttttcttaaaacagtattaatagattctcttgttaattcttcaggcaattcaactaatacttcttcacctatatctaattgagcatcaataaactcatctttatattcagaaatcaaaattggttttacactatttctaatatatctagtaatgtcattccctggtctaagcaaaatcgtattaaaaccaacgattttaaagttttctctatcttcatcatttgttgctttttttagaatatttactaattctaccaatggaccatctaagcccatttctctagctaagaagtattgtttaggtgcatttatatgttctaagaattcaaccattaagattgcttctgcttttttattattaaattccgcctgtgacataccagtcgaatcaatgtattcttgatcagtaattagtttcttttcaacaacgtcattgtataacccaacaattttatcaattggattataatcaacttttgattcttcaccatgttgaatcatcaactctagcaatttaacttgctttgcatcagttttcatatctgcatcaagaataacggcttcaaaccatttaaaatctaatggtttttctttatttaacattctaagacatgtaaaacgtctattcccatcaataatacgaccatcttttaaaacaacaccagcttctctttggttaaccatttgaatattattctttgtttgttttatagcagcttcattagattctataataaatttttgaataatatcattgtaattttctgtatcttcaatgtttaattcaccattttcagaaatatacttacttatccaagttgcaattctgtcattttgatcattataaaatagcttatctagtcgaatcttatatacttgatatgcttttgtttgtccatcgatagttagttttctactaacatctgtatattggacaaaaccctgttcaatacccttttctaataattcataatccatattaaatttcctccaaatataaatcatatgttacataaaccctatccattacttcacaatagtatcctccaatttgatttacagcattgcgaagttcaaataattctagttttattccgtaatcatcccataataattcatcaagttcatatctgctcattatttcataacttgtaagtatttcttctaacaaatcactaatcgtaaatgtcttatcagtcactccaaataacaaagtattattaacagatacaaccttaactaactcatcttgagtaaatatactcttataaaaataatcattaaaatcataatcaataaatatgtcagtaaatccatttttctttgcatatttaattgtgaaaaaccttttatcattgaacatttcaattaattgatttttaatttcttttaaatcatctttattaatacccataacttcatttaagcgcttatagcaaatatactcatttgactggtattcaaataaatctaagtctcttttcatattcaacaatattgtgttaaaggaaatgatatgccagtattgagcataatcatcacggctaaatacctctttcgaagttaatagcatagtaaagaattcctttaaactttcatatttagtacttagaaaatattttgaaaatcttctatatcctacttgttttgcatttcctaacgtcatcttttcgaatggaacatctttactttcaacaagatttttaaattcctcaaagaaatagaagtcatttaccaatatttccttaagttttgtttcgtcatctaatgacaataaatcattatccacaattattccattgctaatatagttagggaatccagttacaactacatttaaaaaagtatcttgtctatacccatattcagcataaagtttttctaaaaactcttccacggttaaaccatccgattcatgtattaggtgttctaccatatcttcttttttaaatccatcaaattcaatcattggcattcttccaaatgatatgtcagggtataaaaaataattttttgaatctaaccacttcaaaatgttatgcaattcgtattcatttctaatcaagaattcattcattaaatctgaataatcattaaatattagcaatgatgaaatacacttttcttgatatctattaaaatcaattctttctaagaaatcactttgttcaatagcttctagatcaaaatacctaaatcccttacgacccgaattaacaataaattccattctttctaatcttgctgagaaattacgttcgcttaattcaatgtcaggatattgaatttgaaattctttatatgctttcggaaatttaaaataccctttaaaactctctacgacatttctcatttcataataatactgaactttagattcttctggattaaagtacaattctatttcttcgtgagtaagattttcatttttcaaatcattttcctcaatttctttatctcctgatttatatcttgtcgataaatagttgaactctatagggttttcaccaaataatttataaaattcttctctagttactttacagtttgtaaatattttataatgtgaatcttcaaataaaggtggaaatttatcaatttctttttttacaatttgtcttattctttcacgtgtaagattatatttattcccgatttcttctagtgttaagcaatctaataatttcatttttaaaatatcaatttttggattatccgagattgattctagatattcttctaacgattctcttttaaccattaaacctaatggagtagattccaaccttctacttttcacaagaaaattaattatcttatttagattttccatgccaatatctacttttctactaatcatgaacagattcatcggatcaacattgttttccaacaccttaataactttatctgcacattcttcgtacaaatatttatttgttttttgatcaacgatagcttttcttagttcaaaaatcattctaacttcatctgttttttcttctactgagagtattttattataaaaaacatctaatacttcttcaatctttgttgacgttgatagagtaaatccataattagttttcatctcagctgctgaataatttgcaatctcatttaaagagattctattatctattaatctattaaagattccttttgcaagtcctaaataaaataaaatatgtatcgagcacttatcaagtacatcatcaacatgtgcacttagtacatcttgaattttaattatcgtattaggttttatctcatagtcagctaatgattgaatctcctccacacgatgatgcattagcatagaaatggtaatatttttttgaataagtctttttatagttacagtatttatatcatactcaaacaaattgtttatttttattatttcatcaaattccataatacatcttcttcctaatgaatttcattgattaacttaattgagactccatattctcaagtgattcccaaagattttcaggtaacacaaatggctctgtaaaagcattaataacaattccaaaaagtttttgttcattatttcttgctaaaggaattacttctaacattggtctagctactttagaaaagtcattgccatattcccccatagcttcctcatttgagaatacagaaaagaagaactcttctccattttttaaaatatctggaatcatacgtgtttcatcaagtgcaacaaaatcttgtccttctaatgctccgtaatcaccatctaatgaattaatcatttctaacatacgttgttgatcattatcactcatcactgctgtacatggaacccaaacccaactatctcttaggactcttaataaattaaataaattttgttcagtttgattttcattgaaattactaatcatttcttcaagtaatgtgccatcttctaaatcttcttcagttagattttctacaacatcctcttcatccaatgatatctcatcacccatgtaatcttctggaacatcatctaccaattcagcactactatagcaaatatagttaccatcttcattcttcgtaacataaaatattattaaatctcctgcatgacatcccatatcttgatttggttcatttaaaagtgtaccaataaaatgatggtctcctaatccttctattctaacccaacagccttcagtttttttgccatctacaaaaagataaaccagtacatcatcaacacaacatgtatccctacttgcatctagaaattccatgcatcttgtcttttctatatcctcactcgctttatattcttccacaacagaaattttttctgcataaaaatcagctaatttaccatctgaatcatccaaataaaaaagttcatcattttcgacttcttttattctaattattgaccttctagtattagatggtttgtaataattaatgctaccttcttttaaattggcacctgctaatacttctagtgtcattccagcttcatgatcaatgtatccataaacaatcatcgcgtttgctttacttgcaccaggaaacttgtcgataagcggtcttttttcctcactaagtctaagggcataaaatctatgataaaatgctctaaaatttgattcattgtacttcataatcatccctcctaaacaaattacaaattcatcatttttagattcccaatttaataacatctaatatttatacatattatttatattatcttatttatataatcgtatcacatatatatacataataaaacataaagaaagcactaccgttcattttccgatagtgctactattaaactatttatttttcgttttctactattgatgaaattgtattttccaaacaattaattatatatgtaactaacgcattatccatcatgaagtaacgatttcttttagtcataccagtatttgtccaatcatcaggaaaatgttgtaatctttcagcttcaacaggagttattaatcgttttcttccagtatcaagatcagcaactacatgtgtacttctatttgttgttccttcactagttagcattgttcttccaggtgatgttaataaatcaggataagcacatgcaccttcagaatagaaatatggttctccgtttggtcttgttcttgggattctctttgcaccttttaaatatgcaaatttctcatcttgcgaagcatttaaataaaatgattcatctacattatgagttagtacatcttttaacggagttagttcaacatatactggtgttgttttttcagtacgtacaattgcatcaatcatacatccagtattttcaaatccgaatttaaattcttctgtcataatgacagtatcttcatatttattatttgagatatcaattgaatgaattacatctactctttcttgttgtacagggaatgtttttgcaaacacaccttgtttatacataatctctaagttatcgaaagaagaaagagatttattgtagttagtatctttacgccaagcaaagataaacgttcttcttcttttttgtcttgcaccatattcagctgcattgattacgcgccattcaacattatatcctttatcatcgaatgtacgtagcataataccaaaatcacgtcctctttgagtagatggagattttaataatctatcaacattttctagtaatacaaatggtggtttctttgcttctaatatatcagcaatatcccaaaataaaactccctttttccatgaatacctttttctcccgcaagtgatcttgcaactgagtaatcttggcaagggaagcctcccactaataatgtatgatcaggaatcgttgttttatcaacttcttgaatgttctgatttacacactcatctccaaatctacttttgtaacactcataagccggttgtgctttagtacttggctcccattgattagcccaaacaaatttccaatctctattttcaatagcctttccattttcatcaaagccttctatattattaagtcccactctaaatccaccaacaccggcgaatagttctacaacagttttttccatctatatcttcccttctaagaattgtgttataattatatcatactttatttaaaagatcaagatcaaataaataaaatcatggaaaggaatgataccacatggcaaaagagtattcaaccattgatgaacttttaaatgacgccaaacaagttgttggacacaaattcaaagagtatgatattaatgatagattatctaacaataataacaaaggaaatctaggtcatgtaattgaagaaggtttctttggatacgatattaacagtaatcaagaacctgatttcggagaattaggtgttgaactaaaagtaacaccatataaaaaagttaataacggaaaaaacatctcggcaaaagaacgtcttgttcttacaatgattaattatatggaagattacgatatcgactttaaagacagcaattgtttccataaattagataaaatcctaatgatgttctatgaacacgaacaagataaatacaaatatgagtatatcatttcaaagatatttctttatcaatttgaacaattaccattacacgaccaacaaattataataaatgattacaattatatcatcaataagattaaagccggacaagcacatttaatctccgaaggtgatacgtactatttaggtgcatgcactaaaggtgcaacaaaagaaaaatcattaacatctcaaccatttaacgatatattagcgcctgcgagagcatttactcttaaatcatcatacatgacgcaattattaagaagttcattcttcaacgaaaacgcagtaacagttcaaagtttaatagcagataacgatttattggatcataaatcgcttactgaagttattatggattactttaaacattatgaaggattaactttagatgaaatagataagcaatcatcaaaaacagtaaatagaaaatcaaaatcctatctacgcgattattgttcattaatgcttaactcacaaatatctaatcctgaggatttagatgaatttagaaaagcaaatataaaaatcaaaacaattagaattaccaaagaaggtaaaatgaaagaatctatgtcattccctacttttaaatttaaagagttagttcaagaagaatgggaagattcaacactaagaaatacattcatggatacaaaattcctattatgtgtatttgatgaaatagatgataaaactaaacaatatcgtttcagaaaatctcttttatggaatatgcccgaatcagatttagatacaactgttaaagaagtatgggaagatacaaaacaaaaagctattaatggtattgaactcatcaaacaatcaaataacaaaggtcaaatttatttttcaaacaacttaatcaaaggaactgataaaaaaatcgttcatgttagaccacatgccgcaaaagctatctacaaatttattgatggaaccacttatggtgatggtgtattaactagagatggtgacgaattaccaaatggtgtcattatcactaaacaatgtttctttttaaacaattcttatatcttagaatctatcgtaaataatcgatagattcttttatttgctgcaaccttaaatacgttctgctatacttagattaagaggtggttttaaatggaaattaaatttgaagatttagaacatgcagatctaattattgatgcaatttataaaggcggtacatctggtaatgtaggtgatgatccgttatctaaattatttccgaaattaggaaacatgagcggttttagaaaagtaaaaagaaaagataatccttccaaattttcatatgttgttctttatacatcaatgaatgaattagaatggccagactatttagatgaagaaaccggtgtatttcgttattatggagataatcgtaaacctagtcgaccaataacacaaacaaaacaaggtgggaacaaattacttgaagatgtatttgcaacactaaattcttcagatgatttaacagatattccaccattctttgtttttaaaaaagctgaacaaggtcgagatgtacaatttttaggtcttgcagcaccaggtaatccaaatatttctcctgataaagatttagtagcattttggagaacaatcggtgacaacagatttcaaaattatgagtcatactttactatacttgatacaaaagataagccaataagttacgattggttagtagcactttgcgaagactatgaaaacagttttgatttagcaccagatgtatggaaaaaatttgtcaagcatggtagaaatggtattgaaccattaaaagcaccaaaaatatttaaaataccaactaaatatgaacagcttcaatgtgatgaagaaggaaagctgtgtatagatagaattagagaccattacaaagataatccaactggatttgaagcatgcgcaacaaaacttatgtcaatgatggatagaaattttgaatcatttactctcacaaagccttggagagatggtggaagagatgcaatcggccactattctatttccacaggtaataaagcaaattatccacttaaaatcgattgtgctttagaagctaaatgttattcaccggacaatagcgttggcgtacgttatatgtccagattaatatcaagaattcgttatcgacaatttggtatacttgtgacaacaagttatgttgattcccaagcatacaaagaagttgtagaagatggacatccaattttaattgttacttgttctgatattgcatatatcctccatagaaatatgattaatttaagcaatatcaacgattggttaactcatttagataacaatactgaacgggacaataattacgcataaatataaaaatttcaattataaaagcagagagactaactcataggctatgtttccctgcttcttttttatacatcaatattttctagtatttgttttagttcaactaactcatcttttgtaaacgaaatacctttaagcattctgttaagcattctgtctttacttctatcccatttacgtagatcatacactggttcaccactaccaaatgcaattatgtttaattctttagtaatgttgttatgtgtactaatagttgctagtttatcaattaatttatattcaaattccataatcattttctcctttagtattgtgataatcaattttaatagatacaggtttagtatttaaatccataatctttaagattactttatttaattctttataattagaatcatattgttctttatcaacccagttaagtttgttagctttggctgcaatttgattaatattattagctataccatgaagatcttttactacttgaaagtattcattacttggactttctactggtgctgcttgtttaatcatcatccgtaagtaagcagacttacttaatttgatattggttaatttaaattcaaagtaatcatataaatcatcatcaacatagaattctattttctttttaccatttctcataaaacctccggggtattagggttcaccctaacaagcgaatttgtccgtacaaattcaatgcttgctacgaatatttttgaaagtctcttgtacatatatttataagcgacttgtcaaaatacctggtatatcaggtatactcggtatatttgggtaccacgtatacctggtatatcggctaattcgtttatgaattatatagggtcataacatcttaaatgaacctttttgacttcaccattttcgtcaacaatattctttgttgtatcagctttacgataaacacctcttgatacaatagaaaactgtttataaaattgatcagatgatactgccggaacaaattcttctttgctccagtttagatatgatgaataaatatcacgtgctattgttctttcctttagtggtgccatttgtttaaagaatgtataaactggtgatgatgtatcatagaaaacatctttcatcactttatcatcttctatctcagggaaacaatcatattctctaagtagtttatatcctttataacaccaattaaatattcctgataagttttgtataagttcagattctattttatgattagctttcttttgatgaggccccattggatcatcaacaaattgattaacaaatgatacaaacaataatcttctaactaatccataattgatttctttcgaatgaaaagcttcattcaatgcaaaaatcattttacatcttggtttaaaagtaaagtagtctttactcttataacaagcctggattgtttcaccagctacaatctttttaaaattagcttctccaccatcagttgatgatttagtttcagttgcgatattaactaatgactctgcaatctgtactgtttgaaaatcattacctaaaccattaagttgtacatatgaaacattatctttattaaagactttttcaataacatttaagaaaacacttttaccattagctccttcgccatacaacataaaactcttttgtaagtgacaatcattcattaatatgtatccacacattaattgtaatcttaaatatcgttcagcattatgatcacaaatatccattacaaattcatgccatttatcataatcttgtttttcgttatattcataatccataatgatagaacataaatcatctttacgatgttctctaaggattcctgtttctaattctaatgttccattcgtaaaattgaaaactgatttttggttaaatgtttcttcatgataacaatccgattttaactgactaaggatagatgatgttcttcctccagtcttccatttacccaaatgtctaccaattaatgctttaactgtttcatcaactttattttcccaaactttaccattatatttataaatccctttaccttttacgtaacgtagttcgtatttgtcgaggatttcattaataatatgatattctgtgggtggtttattaatttctttaaatatcgcttctaaatcgtttttatcgatattctcttcttttattaaatcagcttttagttcaattaaatcatcatttgatatactacgagctgtttgtgttagaatctttttaacttcttttttatcagtttcgtatagtaagacttgtcttacttttttatataattcttcactattcaatgatataattacctttgtacatttcaaaactgtactgttttgttgttgtgttttaaaggaaattctttataattaaatgtggcataggttaaaacattttttaatgactgattcattggcgtgcgtctttcattaatgttcatacttgtgcttttttgttttaacttattcatctttttttacctcatctaatttaatacaataagcattcatgatatcaatcattgtttgtaatggttcaaagatttccattcttacgtcattgatatctttttctttaattcattcatcattaaatctaaattctttttaaatctcatcatagatccaaatccatctttaactgctacttggttataaacacaagcatcaatcaaataatcttgtttactacgataaccagataataaataacgttcatctaaagtataacgttctgctttagatactctaaatgcaatcacctgatttcttaatcgatttttcttatctaagttctttttactcatcaaacataacctccagttctttatctagagaatcaaccatctcatgttgttttaatgggaacatatgagcatatctaaaagtaatttcttcactagtatgaccaacacgtttaccaatttctactgcttgataacctttatgaataagtaatgaaacgtgcgaatgtctaagtccatggacaacaatttgttttattcccgcttgtttagctccacgttttatttcacgttcataataagcagcgcttttataaaatatacgttgatcatcctttaacttataaaacctactcatgtatgcttttaactcttcagctactttctttggcattaatactctacgataactttgtggtgtttttggcggtccaaatatctcttttgctttatgtcttgcataagacttactgatagtaatgatattcgtatcaaaatcaatatcctgtttagttaatgctagtaattcccctattctaataccacaccaatataagatttgaaatcccatataagattcttctttgtttgcaacttcgacaatgaatttcttataatcctcttgagtccaaaacaacatttcttctttatgtttaatcttaatatttccggcttttttagctggattagatggtaaatcgtagatattaactgcatgattaaagattgcacttaattctgtatgaagtccttgaatataggttggtttaatagttttaccatctattttcttaacatcatataatgttgcatgccatttcttcacatccgcagcagtaatatcacaaagctttttatcaccaaaataaggtagtacatgtttattgagtttcataaccttgttatcatacgttctgattcttaactcaggtttgatatcttgtaaatacagttcaacaaatgaagaaagtgtcatcgtaaagctataggtgctttgtaacttaacttctttttcaaacctgatggcttctctttcagttttgaagccccgcttggttgtttgcttagtctttccagtaaagtctttataccgataccttactgtataagtcttgcgtttagtatcgtactcaatactcattaaagcatctctcctttccccgcacgataaatacgttcttcatagtagtctttattgactttcccacaaattgttaagaatcctttttcttctaattccttatttaatcttttaatgattttataagcataagctttagagattcctaattgtgatgcaacttgatctgcatctaagaatgctactgacatggtgttcatctcttttcaaaacattatcaatattgaactgttacatatagtttatgtctaatttatgtctatgtcaacgtattatttatattttcagttcacttttgtattgctaatcatggtgttgtgaagtaatattaacttatgataaattgcattaaattacataaacttacgttaactcatgacacgttacgagtaagttatgttaacttgcgtgaacttataatatgcaaatttctcataacaatttttactttacggaaggaaaaaatatattatgacaatcgaagaattagaagaactattcaacattgacgctgctaaacgtattaagttttatagaaaacttcgtaaactaacccaaaaacaacttggagaactatgtggtttaagcgaaccagctattagaaattatgaactagctaatagaacacccgatgcagaaaccttgaaaaaaattactgatgcattaggtgtagactattatgcagttgctgaacctaacttagctgttagttcaagtgttctccatactctctttaaactagaaagtatgtttaatcttcaaccagttgaaattgatggaagagtctatcttgactttgctcctaagaaccctgaatctaaaggagaattccaaaacaatatggttgaatggttagatcaaagagaaaagttactttccggagaaattaccaaagaagaatatgtgttctgggaagcaacttatttctcaaataaaaataaagaataaatcgttatttttattaaaatctatacaattgtggtcacctgtgctcataggtgggctcaaacattatagaagatgcaaaaaaactcccatatatagggagtttttcatattttatcgttattcaaactccgaaataaaacgattatagtgaacatatttgttaacatttcttcaagaaatgttattatttttcttattttttacttcttttataaaaagaatactataccttggtagcataatggtatcatcgtattctaggttcgattacattcatatttccactcttcaaaactagtcaacaaggtgaaggcatatttcttttatcaattatttatattgtactagccttattaggttacctttccctataattaaaaagtttatctcacatacaagatactgtatatcatcattgaaaacaccaataaagaagtatagaaaaacaatcaaaattatcattaaccgattctcaatagcttatttagtcgtttgtactttaatatactttctttttgcttcatcatataaactatttacttcaaataatatggattccttttgtttaataaaattttgcattttattataaatttcattataaataatcctatgtacctcatgatgcagaatcgtttcatcatattgatccatatcaaaatcatcactgtttatagctttattcaaaagataataaatatcttcgctaccaatcttatcaatctctatatattcatttttctcattataataatacccctttgatttatctatttttaagtatttcataatcttttttcctttcattatacacactatccccaccttctaaactcgtaatcaaggatgaatagttatcaattgttttcccctctatagacgttaattcttttgaggtcgggtatcctccaaataacataaaagaaagattgccttctgcatctatttctcttttggtatataaataataatctggtttaatagattcaccaacagaactattatgagtaaccaaaaaaactgggatatgttttgaaattccttttattctttcatttacatctttatttaaaaacatattatcaaatgatgattctggctcatctattaataacatatcaaattgagttacaccattaagttcctctaacagtctaaattcagatctttctcctcctgatacttctaattgatattcatttaatattttataatcaaaggaaactatatatttatatatttcagattcaggtatggattccattctttttaattcctttatgtatgaatacccatcttcatatttttcaaaagcatccttaaaagatattctctttgttgtaacggttttataatcattcaaagctaaaaaaggttttgttttagctataattgtaaatttgtttacctgttcttttaaaacttcagttggttgtttaatcgcattgaacaaagagttaaaaacttctattttctttttactaagataatagtctttaaaatcgaaagataatggttgagcaatcgtagactgagttgttaaattgtctttgatagttctaataatattgtttgcctcttttatctttttattattcaactgtatatccgcgttaatgtcgattaattccttcattaatccaactaaagattcattatctaaatatttattaattaattcccgatatttcaccgaagacaaaatagtaatcaatgaaattattaatgtattaatttctttatcatcttccttttctaataatccatctgaataaatttttgctttagcgaaagaatctcttttattgtattcagttgcatagttaatccaactatccaaatattgctttaattcattttctttcttctcaagatcaattggaagtatatcaaccagcacattttttaaatcttttaaataattatctattaacaaacttttatttgtctgaattctcttcgaaaatatttttatctcgctttcttcatctttttcaattagcgaaaactgtttgatatattttacattggaaaaataattgcatattttatctaaagttaccgatttacccgaagatctatttcctaaaaccacattcaaaccactagatgctaaaaaaccgtttggtaagacttcaaataaatcattcccaccgtcctttgataatgcaactttatttttatcttttaaagcatatttgagtgaattaaaagttatactttgaacatcaacatatgtttgtctcaatgaaaaatcagttaaatttgcagttattcgctcatcactaaataacacaggaaccaatgaatcattatcatttttacacaaagaaaatttgttttgattttttacttcgccagtatatatgttacctattttagaataccactcgatcttcaagataggattcttttgataatgtggtattaaaatgtatttatctcgatttttaaagatatcattaaatgcgtcaaaagttaatgtatcattttcagtaacaattttttctgataccaaattacatttttcttcaaaatcatatatatcatcttctgatgtgataattaatagatgtccattttccaaatcaacctcaacgcctagaaaaacagggatatctaaattatctcgaacatattcatattgcttaatatcaaataaattatgatttgtaattgctattgcgtctatttctctttcgcagatatattctttaagtttttcaaagctaaattgaaattcataatcacttactgtttttattgtatgtaaatgcaaatcaatttttttcatatagcacctcctcactaagcatttgaacacaggttactttttcaataaaacattaaacatgacaatcattgataattacatccaaatcttcatatgaatatacatctttaatattaataactttccaattatcgttaatcaaatattttgctagttgtgtctgtttattagatctagaattatataatattgttttcattttttctgaaagtaagggaatgtctttgataatctttccatcaaatctatatttagtattctttgcgatattaaaattatttactattaaatattcgaatatttcatcaatttttttatttttgtcttccgataataatttattttttttatatacttttttattaattattacataattttcaaaatcacataatccaattactgcaatcgggatagtaagcacattattcattggtttgagatgttgtaagaatttttcaaaactacctactgcattatcaaatcctccatttttctttaattcatccgttgcgcacacaatgatacctacagatgtattaatatccttctctacataatttaattctcctgccagcaccaattttatcagattccatgcaacaacttgcccatgattaaaagctacttcaatagcaaattcattttttgagaaatctattgtccatggatttttgtgctcacagctattaggacgatattctgagtcattgaaaatttcacattgtctcctccatcctttagtttttaacctatcatcaattattttattaatgggctctgacaaacttttgatatctttacgatttgaaatttcaaatagatttacaacttcatcttcagacatgttttccaatacatctaacaattcaaaccaatcatttttatataactcatcattttcaaaaataatttttgcattcctaaatgaatatattttaaatttcatcaattaacgctccttctaagattattattaagtttaaaactattttcgtatagcttagtagcttatataaacatagcatttgctttcttattacaccttatataaagacattagattaggattgtttgttccccattcttacttccctatatgccctatcttcatcattatttttaaaaatattatatatccactctggaatagcataacattcttttcgatgctgaaaaatcaccttttgaatatctattaaatcttccattgtttttatttcattattattaatatcgttatctagttcattcagtgtacttatatctttatttaacttatttacggtgtctaataaccattttagcattggaacaataaatgccaatctccacaataaatctaaaatcctttcattcttccacagtcccatcgctaaaatcatgacaaatagaattataatcaaagttatacttgctaatctaaatctttttcttagtccaacatcccaccaaaaattttctctttggcattccaaaattccatcaatgatatcttttttatcaacaccaggagtataccaattttttagtttatttttttcatttacattttccaagatttttttagaataaatcgttacttcatgattaatatttttatcctttccaaatatccttttatcccatggcattccatatacatatacatcaaatttttgctgaataaatgctgctaaatatttcctttctcgtatatatttgtcaataacaaaactaaaagacatactaattatagacaagatatacgatacatacttcaattctggattttttgacaaaaacaaaagaataatagctaatataaacggtatccataccgataatgctactagaagtgtatttaatttttttacatctctatataattgtctttgtgccgccaacattgcaattgatttttcttcattttgccttataacaattccattagacatcataatcctcccatcatcgatataattatctctttttttcatctacaaattcgacgaatattaattaaccacttttcaaagttaatttattctaatttgaagttatttttaaaatgtatctactagtatttttgcatttcactttttatatacctcaatctcctgtataatctggaaaatcatttccaagtacttctttccattttgtaattgcactcttttgatctttgtttttgatttccatttttgaagcttctaaagctttattatatacattgtgcaaagcttcacttattttgtatctatctgaccaacaaaaataatttaaattcccctgtattccctttggatcttctatgtctgacaatatagctgaagacaaatattttaacaaatctctaaactctaaatctatccaccatgtttcagaaacacttttgttctcatatctctgaagaatcatacactctaataaatatgatcctatttttattgttacttttctattattccaatattttgttaatctaattagttccaataattttccattatgccttatatttacgttagtggtccgttcattatctatcctaggattagtttttttccaatttcccaaaccatctggaatcaaatagaaatttgcatccgtataaaaacaaggaacaatatcaaaattccatgtatatgattttaatctcaatgttgctgcttcatgatttttatgcatctcagctttactgtaatcttgtaaatccgataatttagagataaatcgattgattacttttgtagaattcagataatttgtgttatctgtcattaatttatttgaagaatcataatcgttaccgtatatataaaatatttcccctaatttcgtatatgttcttgttccttctcccgataaacataacatcaaatctatatcatcaattggtcttatttttgtacgccgttcaaatgatccaaagcgtaaaattttatcatcatatacttggaagaaatcattttgaccactaaatccttttatattatcaattagattatctctgcttgaacgagcagtttttgttttttcttgatcaagattaactgtttctctcatgaattctgaaaatgccccattcaccgttgtcgccatttttattacctcctaattcattcaatctatttcacatttatcccattatcaagcattttttcttatttttaaccatacacaatgctatttaattacataatcaattttatttacgcttataatttaattatataatgcaaatcacaatcaattagcaattcctacctacatgtttcatgaataatatcttctatctcttctatacaatagtttaaatatttttttacatcattactccaaaaatgaattggaatccaatcaatttgtcttagaaaattatcatttttaatgtctctttgaatgttttcctcaatcttttcaatccaataatctttattattcttaagtttatcctttgttttttcaaaatcttttccatgccaaaattcgccatcaacaaatatagctatcttgtattttgttaacgctatatctggagttcctggcagttttttataattcagtcgataatgatatcctttatgccataaagcttttgcaagtaaagattcaaccttacttttcttatggctcaacgccttcatacgctttgaaacttctggagtagtttttaatttttgatgtttcacatacatcaccttactttaattgctttaatacatatcgcttattcaaccaaaagctttgttttgtcatccattctccatttggcaattcatctgcatctctttcaacattaccttttatgaatccatcatttaacttataagcggatttttgagcatgcggacgcatatgtatgatttcagtatctttcattccaggcaaattattctgaacttctaattcaccatttacatttttaaccttttcaaagattactccgcttttgattatatttttatacttttgccattcgctttttacaatgtcattcaaatcagggtaagacatatgccataatttagctttctgtaatacataaacatcatcaactcttttgaaaactacaaataaaaattgcgttgtatcaaaataattgaatactgtagaatcttcccattcttcttgtacaaattctttaaatttgaatggtgcaaaagacatgttttctctattctttccattttcttctattcgtatggtcttaactacgatatttgctttttgaaattctgcagcatgattacctttgattcctaacattcgaaatgcaagatcataccattgtgctttgttattgttatatggtcgatcgtacacttcacataattctttatctgtcataccaatgtgcttatttatcaaagatacaacatgctcttgaaaacttgttttgatgtcttcttttattattgattcacacggcacattgttttgaaggatgtaatttttcaaaacataattcatgtaagatactttgaaacaataatttcttttcttagctaaagtatgatcaccataatattgtggccgcaggctttttttggcagttgcgcctttcgtacaagctcccagatacatcgtatctccttcgcttaattcatgagcttttccttgtttgattttttcattgatctgattatagtcatcaataattatcttaagatcatccttaggcggactaaataaatttacaaatttaatgacataatccaaacgttctatggacttgtccctcaaataatgaatcaaaaggatacatttaattttttcccatacatgacttttatagaaatcttcttctacaggttcattataagaaatatttgttatggacaatctttcccctgctctatattcgccttttttcgtcttatcaataggtgtttgttttaattctaatcctatcttattaaaatctgcttcttgattaccatttggatcataaccaaaatagtatttttctataaaattacccaattgacctttcgctttgtcattcaaagatgctccaaaaccatattctactgttttttctcttactaccatattttcaaaattggcatatgcatcatataatttccctccataactttttattggacttctttcatattcatccaatacctcatgaaaggtcattccttccaatttttttgcatatgaataaatactattgatatctgtatcatcataatcaaataacttcatatctatcaccctctttcccaatatgcacaaaaatcttatgcctaagacataagatcattgttctttatcgattattttatccaaaacttttgccattcttgtgatcattggtactaccaatgcattccccatgcaaaagaatctcatcctattaggcattccactattagtccaatcgtcatcgaagccttgcaaacgttctgcttcgattggagtcaatgttctcaatcttcctgttccaggatctgaaacaacatgtgtgcttctattcaaagtagattcactagtaagcatggttcttcctggtttatcccatgaatccgggaaagcaataggaccctctgaaaagacatactcatgccctgtctttgatacacgatttatttttttcgcacctttcaaataagtccatttgctcattttttcgtttgttatataaaaactttcgtcaacattagactgtaagatatctcccaatagtataggtgtctccattactggaacaacattatttgtatatattttcccgtttctcatcaatccagctgatttaaaatcaaatgagaatttatctgtcatttctaataaatcattcatcaaagttccttcaaaacaattttctacttgttcaatcggaaatgatttcgccatgaatccatctagattgatcagtgataattcgtccatttcttttactgaatcagcataaaccgtatcatttctatatgcaaaaataaatactcttcttctgcgttgtgccgcaccatattcagcagcatttattactctccactcagcagaatatcctaaggcattcaaacaacttaagatgataccaaaatctctcccacgttgctttgctggagattttaataatctatcaacattttcaaaaatacaaaatgctggtctctttgcttcgatggtatctctaatttgccaccatagaactcctttttttccttcgataccttttgagctagataacgattgagctactgaataatcttggcaaggaaatccaccaaccaaaagggtatgatctggaatagcgtttttatctacagtagaaatatcttcacaagtatgaaattctccatttatatctggtgaatctccaaaatgttgcacatagcactgatttgcccattgtgttctcgcccctggttcccattgtgaaaaccatgtagtttcccatccagaatcggctctttcaaaacctaatctaaatcctcctacaccggcaaataattcacatattgttttgttcataaagtcctcctagtttacacttctcacttattttttggaatctaagctttgccttgaacactatcaaacgatagatcatgattccacaccgaaatgagcctcagctcaaaaaagaaaatcaatcaataacttctataatttcatccaaactattacaacctaaaaacttataaatctttaataaattttccatcaaaatagtctcattttttgataattttgctaaagtcccaggagaaattcccgcttcttttgcaaattctgtctttttcaaacctttatcaattaattttttgaataaattattataactaacttgcatatcgattttcctttcaacaataaaaattatatcaattatcatcttataattgaatagttttttcatataattggattttttatttgttaaattgaaaaagcctcttgaatagaggctaacatttattcatcaacgttgatactgttcgagttcagctacgtatgttatttcatttaacaccatgcaacgaagttttttattgatttcactaaataacatagatttttgtttcttatttagctttgaataagtttcaacaatatccttatcatgaatcaatatcatttgtgcctgtacaataaataaatctaatgacatcttagctacgttagtgatatcttcttccaatagcccttccttgattagataatttagatagtctttcttattgttttctaatatgaactttctttttttcgataaagaaatcaataagatcatcctttagatatttttctttaaattcttcatataaagtcgtaattatttctccttttatcttctaataaaaatcttgctgatattattttgatttacatagccatgattacattgatcaacatttcttctaccatgactcttatattattcatttcttgaacccatttcatttgatcttgttcttttaattcttctgttatatttcttgacactttgtattgttcgataaggatttcatatcgttgattcagctctttatccacacgaatcaattcttcattcagttcatcttttgctcgtaaggcaaggtaatgtcctggatgtttatcttttaatattcttagatattctcttccaaatctggataaatttggtaaaggtctttcttgttttagtgatggaaattcataatctcctactgtgttatacttgatttctttcatgattttatcctcctatcttgcatctctttgtttgattttcttttgtgctattctttctatatctttatcaaagctacgatttctgatgttctcgcacgcttttatttgaagccttagcttcttaatatcaggtgtaaacaacttggctcttgctgaccattcttctttttcatccattgtttttgctcgttgtcgttgataataacatccttgtctttgctttaataagttattgagttcatcctgtttttgttgttgatagctatttaattgatcgatatcttctatcttattcttggcaaggagttcgatttctctagaatattgatccattttcttgagtgcttgtcttgcttctttggatatatgttgctttcttgcaggtaagatatttatcgaaataagataagcaacatggattcctgctagcttaggtaactgttttcttttataaagttgataatattccttacatcgataataactttgtgtgtgttcgacgttttgaggaaggatccatttatcggtcaatctttcttcaatttcatcaagatgatacttttcccctaatgacttaagatatatcggttcattacaatatggatgataaacgacatcttctctatcaattctgtcgaactcataccctttctttttcatattatcctttaaatccctaatacaattactttcctttacaagagcatcgatatcttttttaatgtcattcatatagatttttatgatatgataattcaacttttttgaaccataagatgaatcttcgatgacagataatccatattctttgcatagttcatcggatgtatttctcatgttccagtaatctttttttgtattgcagaatcgttttccatcaacgaatgaagttgaatttatcaagatatgattatggatatgatctttatctaggtgtgtggtaacgacaacttcataacgatttccaaacactttttgtgcaagctttactccaatttcatgtgcaacatttgcatcaacctcacctattttaaatgactgataaccatgaaacgctacgattcttttatgatcatggaacaatttcttggtcatctgcatcgattttaatggattaaatacatcgcaattaagacaagtttcatactgtttttgtttgatcttattatcttagctgatgtaatccaagaccgtttgcatcgtctttttttcatcttcaacatacttgatgacattatccaaacaatctcggatagcccaaattgatgttactgctttaatcaaccccttactttttcatcaagattttttatcatttgtcttaattcatcgattgttacctcaatgatttttggagatatttcttgactattattcaacgttctagcaatctgatttaggttattaccaatatgattgaactcattttttaacttataatactctaaatcaggtggtatttttatctctttacctaatatgcaagctctagaaaatgcttctctacttaattttgtttttcttaatttctttactaacgtttcaaattcttcttcattgaatcgtatcttaatttcatgatttcttttcatatgaacctccaatcttgctggtcataccagcttttgattttgtattttggggacaaaatacgttgcttgctgatacagtattccatgtagtatggtctatttttatttctaaatggtgacgatgtgacggtctaaaacatatactttcctatcgtcacaccgtcactcctttaatcttcttcctcaccatgataagtgagtttcatttgtcttgctttattctttctctctgccttttcataactaataaatgtactttgcaaagtatcaatattacttgtgaggagtacctgtaatcctttaccggtcaatggtagtgataatttagaacacaatgcttcatgtgagccaacataatttttttcttttacaatgtaattgactactttaattagattttcattgacgtcttcttctatttcattttctaccacctcaagtaattgtcgttcatttaaatgcaaggtcaattcatcatctggaatatcttttccttgaattgccagttgtctatttttagataaatgatttttcttatacatgacaagaatactatcagaaccagccatcaatcctcgacttccatagattccatcaaatggatgattcgtatctatctctttcttaacatgcgttatcaatacaatagcgatattgtacttacacgctagttcatgatagaacgttgcttctttatattcactctcatattcacgatcattcttttttctaatctttgcaaaagtatctataataacaatcttcaaatcactatgtcgcttcagttcttcttgaatacgactttcaacatcataattaaaatcttgttttaaaatatctatgataaaattatcttgcttttctacttgcattgttctcaatcttttttaatctttgtctttctatcttcaaaagccaaatacaatgttgttcctttttcaacctttcttcctagaaaatctttacctgtcgcaattgcatccgataattgtaaacctagaaaggttttgccacatttctgtggagcacctaaaagtgttaatccaactgaaatcatatcttcaacaatatcagcttcatcatcttcttgtaaatcaagcaattctgttacagtataactcccttcataatgcattgtatttttcatttcaataaatccttttttatatttcaaagaactttgaatgattgtttctacttctttatctgaaagtggtggcttacatcttaattcattttctttattcaaacataaacgaattgcctcatcacataaccctttctgctgaagaaagcaacctatcttaaataaatagttatttctttcaccttcttgaatgtaacccatcattgaatttactttcgttagtttgttgtttttttccaagaactgataaacagaatcattggcatgtgcaataggaccatcaaaggatatgaagtattttttattttcaataacactttctgctccaacaacatatcctccttctccacgtatgtctatggcttcatacaacccgactttacatgaaatcggtctatccacgtagtaatacatatgccatccattattagcagttttcacaacaagtgttttaggaaaattttttaaaaatggttcaatagattgatacccattctttccgtttttattatcaacatctatcactaacaatccattaccggttctaacaccgacattgtagtcggtattagaaaaccagttcattattgtatcttgatctgttgtagcttcttctttccatgattttaggacttgcccacttttagaattgactttcaatggaaatactttaaaatgatattgagcatacattaaagcgcttgttagtttaggattcattggcgtgcttccttatttgctttaatgagtgcttcttttttatttttcatgttaataataatttctagcatatattgaagtatttccaagtcatctatatccatttcttctaattgttgaacttcatgaaataattgaataaagcatcttaattctcttcttaaagaacgataaacatatggattgccttgaacaacaaacgattgatcactcatacaatgaatgagataatcttgttttgtcaaaccacttaatataactttacgattcaagacaagattttcctccggtgatactcgaaacgcaataactttattgcgccaacgtccttgataatctctgttcttctgtgacatcaaacgcttcctctctttcttcatctaatttattagcaatttcttttcctttggctgggaataaatgtcatatcggtaagtaatgtcgatactttcatgccccacacgatctgcaatgtctactgcactaaaccctaactcaatcaatagcgatacatgtgaatgtctgagatcatggatacgaatacgtttagttcctgtttctttacaaccacgatccatttcattatgcaatcctgattttgaaatattaaatattcttgtatctcgtttaattccatataatctgcgaatataatcttgcatttcttcagaaagaaaatgtggcatttttactgttcgaatactcttaattgtttttggttctgttatcacatttttcccttttagtctttgtagcgacttattgatacggattgtgtcttgcgtaaaattaaaatcacttggagttaacgctaatagttcacctaagtgaagtccgcaccaatacaagacttcaaatgcctgatatacaccatcctttctcatcattgattctgaaaattttaaatattcatcttttgtccaaaacttcatttcctttgttttctcctttcccatgtttccagcaatacgtgctggattagatttcaaactgtaatatttcactgcatgattaaatattgcactcacttgattgtgtactgttttcaagtagcaaggtgaatatggctcatcattttcatttctatacgcaagtaattgattttgccattcaataatatctgcagcactaatatcattgatttgttttaatttaaaatatggcaaaattttatcttcgattatataacgttttgttaacattgtattctctttaatacgattagataaatctcgcacataaatttttacaaattcctcgaaattcatatttaaatcttttgactgttccattttgaaacgtgcgataaaagtttctgcttctcgtttcgttttaaaacctcttttcattttctttaatctttcccctttccaattttcataatagaaagaagcataccatgttcctttattttcatctttgtaagctggcattttcatcatcctttcttaatccataaattctttcttcaaaatacttcttactgatacgaccacgaatggttataaatcctttttgttctaattcaagatttaactgtttaattagtttataagcatagccttcagacattcctgttaccttcatgatctcactcgcatccataaatgtactgttttccattttctcacctctttttgactaacctatatgagttaggttaaaacataagaataatgcaattagatactattgtcaagaatgaattaatctttttagtttaatttattaactttatatatttaattaactaactttttaagtttaattttcatttactgttcattatttttttgatataatggggacaaaggagggattgtgatgtcattaggatcaaatttaaagtcaattagattatttaggaaaaagacattaaaagaacttggtcaaggtttaggttttagtttatcatcagccgatgtccgcatttctcaatatgaatccgataaaaagaaaccaagaaatgatatgatagaaagtctagcacatggacttgaggtttcaccaaacgctatagatattccagatattgaatcatacataggagcaatctatactttgttccaattagaacgtacatatggattaaaaattgatgagatggatggacagccgattttacgtttcgataagttattacctcatgaacaaagtgttttgtttgaatacatggaaaattggctagaagttgctaaggattttagagaaggtaaaataacagaacgccaatatgaagaatggaaatacaattttcctaaatactcaactttaaatgccaataaacaaccgcatgaagattggttaaaaaacaagtaaacatatttcattaagtaggattgaatttcctacttttttcatgtttctactattcctagaataaaaaacaatataaaaaagaatagtagatacccttgtcagtagtatcaaaatagtatcaactcctttctgacaaaagaaaaaagcccgtaaaatacgagctttctgcaatttcatctactattcaaattcggttttaacaaacaatcatgtaaacttatttgttcacgtttaatacaataaaaagcattatttctactatatttgctttaattttttgagtatatttttagtggtagtgaaatggtagtgataatccatattataaaaatatacagtatacaaaatatctaattttcaaaaacagcataatgcatcaatttactttcataaacatgtcctgcattttcaaaacctataagttaactattttttcaaaaaagtttctaacctgctagaatagtttcaaaattattaaatactttttcttttaaatttttttcatttcgagctatttccacagcagtatatacatcaattaatgaacctggataatattttttattattaacctttgtaaatggaccatcactttcgattaacaatttatttctaggtattaaacagactttatttattttttgtttatttgtaatcatatttgaatttacagaaaaatagcaacctaattctatcaatttatttaaatatttgattggtccattataccaatgaataatgcatcttaaaggtttatattttgttaatatttcaattaattctttttctgcaccttttacatggacagataaaatcttattttctttagaacatagttcaacaattttatcaaagtaatatatctgattttcaattttcattgcattgctagactttaaatcaagtcctacctcacctatataatgcgactcctttgctaatttaagaaaatgctcaaaatcatacttagtcagagagttgtttaaaggatgaaaacctaaagcaaattttacatatttagtctctttatacaagtttctacatgatatataaattccaggagagttagtcatgcataacgtaatttgttttttcctgttaattgtattatatatttcattatggtttctataaaaatctaaatgaaagtgcgtatctatcaaattgtaattcataatcctagatattctttcattcttgggtcagatgtaaataattgtaataggtcattcatagtttttttgtatacatccataaatttttctatttcatccggcgttaaccttcccacacttataatataacgttttaaatctttatcttccatgtgattataacgataaatactacttaacacagcccttaaatccgatcctttttcattatcttcattttccatcaaaaaatcaaagctttcacctgagaatgaatacaatttgtccttttcaacatctaaaacagaactttttcgtatcaaacaaggataacaatatccacaattaataggatactcattcataccaagtttattatatctagctaaacaagggtgggaacacgaaatcgtataaggatagcaagatttaaatgcatcagtgtctttaacttgatttacaatttctctcttagtattaaaagcaaagaaattaattatagaattttcaatgccaaccatatttaatactttattaaactcccttaaaaaatgaggatgagttgtacgtgtgctacatgttccttttctacttctagtcaacgaaacatttaaaccaataaatccattttctggaatatatacaggtgtgtctttccctaatattcctgctatacttaatgctgcacacagaaataacaaagatcttcctcttgaggtattctcacttccctttaactgttctccaaaacaatttattggtgctctagaatttgcagtaaaacttaaaaaatctactttttggtttatatatatttcctgaaatgttttcctaaaatccatttgtttttttctaagtttaggatactcattatgaccaattaaacatggggatttgccttcttccaaaagtttaattgcaccacacaaagaatctaaccctcctgagaaaagacaaacactatcacagccatttatatttagatgttttctatttggattttctctattactatatacaatattactttttctaaattctatatgccacttatcaccagtaagaaaagacaaaatatcttcccatttactggttgtatatttccatacatcgtattcaagcacaggaattgaaacattaatttctcttgtccaacaatctttagattttcgtctatcaatacgcttatcaagtgcaaaaacacttattcctataataaacaaatcttcataaacagaatcgattttgagtcggtccattcgataccagatatctgtaatattcgtaaatatagtgctatacgattttctattgattgaaaaaacataagcattctcccaatcgccgaatggtttactttcattttctttatcaatccacaagtacatatttatacctccccataataattctcaaatatagaaaatgcatcttttaaagtgttttgtactactagtgaggaaccaatatcagaaaaatttacagaattcaactgtgttatttttaaatctccatcaatagtattatctatatacccatgcatatctttgattatttctagagtttccataggacttctaccttttgaaatcttttcctcaaaagaaaaatcaaaatgaacttttatatattcttttaacatttctttaagtaatacatcagtcgatatcgtgccaatttgagaaatatcttctatatgtagattatctaacgcctgagataatgcatcagctgataaattatcttctatagttgcaccggcattagtaaaatcgtgaagtagctctgcccatactgtattaggtgatttattgattaaatcctctctattatattcttttaacgctgaattgaatccattagatgctacactttgagcaaagcctaaaacttttgttgcagtggattgaaatgaactttcaacggacatatctgatttcattgccttggcatatttatttgctgcatttacttttgatgagttatctctattattaacaaatgatgttactgctcgttttgcttgtgaccaatgaggagtagtaggtggtatatacccttttgatgttcccatagttattccttcctttgttccttgattttgtttaccatggcttcgttcaacatgtcctttgtcttcatttcatctaattttggtcctaaaattgtagaatctttatgatacatagttctcaaggcagccaagtcagcaagttttattttagaaccagattttattatagcatcaacaattttttctctataacttgcaaattcacaataaaaatcacgtataataaaatagctgatatcatttttctcgattttttgatttaagacactaaacacatctttaagatcttctggcgatagtgattttgcatcttcaattatagctttcataagtccagaagttgcttgtcctattcgttccaagagttttcttacatctccactaaatgaagatatatcaagatttctgttttttaaattttctcttgttaaataaaaatacttatctaatctttgtttttctaaatccacaggttgacattttaaccatctttgtattgctggcgttgcccaagactcatagtctgaattgttccccttttcaactgctattcgcattttcttaaattctacattttctaagtcaaaatccttattccattcattaagttgaacaaacaaatcattatccaatttctgtaaaactaagagtttagccaaaatagtcatattcaattcatcaccataatatattttggctaattttctcttagtcataaaagtgtttaaaaaacgtttagcttgtcgtggattcccttttaatgcatttgcaacaatatctttaatattatcaattacaactgatatatcattaaactctttattatcatttatccatgttaaatttaaatcactaatcattttatttatttgtcttaatgtaatcgcatcttcagatataagaatttttttactaaatacttcttttaaaaatatttgaaaattttctttagacaaacagctttgagttactaataaaagaagataattttgaatatcttttgatgacaactctggaatatgtatgggtaattgaataattttttctatatattctttatctaattcaacttctagccccttcataggtggatatctttcacgaatagaatatttaattacattttcatctactgcaataataaaagttgttttttctacggataaaaataactttattgcttctaatatatctataattctctcgggacgacatctatccaaatcatctatcatcactacaacattatcaattttggagttttcaattgcatcagtgaattcttttctaaacttacgtatataattaatagtactatctttggtagttgtattatcatctttccaaaactcatcttttaataattgtaaagaattcgctgcagtttttattgtatttcctatttcatcagctgagcctgtcagatttagcatcataggcaatggattaccagatgctacactagccgctattggtgcaagcatcgaaacagtttttgtacttaacttaaataaatcaattctttttagcaagtttctgatttttttctttgcatcttctaccggaagtttttcttccaattcctgtagcaacgcttccataattgcagtttttgcatcttcataagactcaaacatccaagcattaattgtaacacataatattctatcactttcttcttttaatttattatcaatcaatttaataagagtagacttcccagcgccccataaaccaaaaacacctactgttaatggattgtaatctttatttcttgcaatatccgagatgatttgtgcatacggatcataaaacaaaacatctatatctgatgcgttatctaaccacattttttccattgctcctttctaccttttacaaatattttttataaaaaatatatactttttaattcgtagcttgattattattgtcattgttacatatcaaatttggatcaatatcaatcatatagcaatgatagtctattgcatccatcaaatgaggatttagttgttcaagtatctcctcttcaatcttatttttttcatcaaatgtagctttaataacataatcaaggtttaaccctgataaaatatcatcttcatcatgtcctaaagctactttatacatcactctacaaaacataacattttctgcaaatacctcaatcttaaattgatatccaatctcaagagatatgttttgatttattggatatataggatttgttttagattcagtactaactaaatgatattcttcaattgttaccatataacattctcctaatcttcattatcgataatttcagataaatatggttcgattgtacttattacaaacgtaacaagcgcgttacccatcataaaatatctctgtctatcagtcattccagtattggtccaattatcaggaaaatgctgtaatctttctgcttcaataggagtaattaatcttttaattccagtatctaaatctgcaacaacatgagtacttctattcactgttccttcgcttgtaagcattgttcttgatggtttatcaagtggttcaggataagcgacaggaccttctgtataaaaatattcagatccatcaggtctatttctaagtattttttttgaaccttttaaatatgcaaatttttctttttgactttcttttaattcatattttggattaacatttctttgcaaagtatcaacaagtggaacggatggttttgtgattggctctgttgatatagttaaaacataaccatctatcatacatccactattctcaaatgacattttgaatttatcagtcatttcaactgtatctttgaatttatccattccaatattaatcgcattaacatctaaagtttctttatctaatactttaaactgatgtgcaaatagtccatcttttaagatgatatcatttaatttactattaactaataattcgttatattttgtatcttttctccatgcaaatataaaagttcttctacgtctttgccttgcgccataatcagcagcattgattactcgccattcaacgttgtatcccttatcatcaaatgttcttaacattataccaaaatctcttcctctttgagtagaaggtgattttagtaatctatcaacgttttccaataatacaaaggccggattcttaacttccaatatctctgctatatccaaaaaaagaacacccttctttccagtaattcccttttctcctgaaagagatctagctactgaataatcttgacatggaaatccaccaactaacagattatgattaggtatttcagttttgttaacatcactaatgctaatattagaatgattttcactcccaaatcttgtacaatagcattcaaatgctggctgtgatttagttgatggttcccattgattagcccatacgaattcataatcattattttctattgctctgccctcttcattaaatgattcaatgtgatttaaaccaactctaaatccacctactccagcaaataattctacaactgtcttttccaatagtaatctctccgtttctttatgttttaattatatcattcaataatcagatgatcaagaaatatataatttatgtttcatttgtttcttaatgacaaatgtgattataccatttttgaagatttagatcaagtatttttggttactttacaaactaacttgtaagccacatatacttacgaatataatgtaagttaagaggtgatttttatgttatttgaccacgatgaaacagattctagaagtatcattgaatatgcaaaaaaaatggaacatttgacttacaatgacatcttagaattatgcagagaatatgttagggaatgcgacaaaggtttagtaaataatagagatggtgtatttataaggagtttaaaaaatgacactctatttaatgatacaaatgcaaaaggtcagttaggaacttttattgaaaaatattattttggctatgagccaaatggtgatcaacaggcagatttatttgatgcaggaatagaaattaaacagactccaattgatacactaaaatcaggaaagaaagtagctggagaaagattatcaatcactatgatttcatataagaatcctgtcattgacaacttttacgaatctcatgtatgggagaagattaaatcaattttacttatccactaccttagagataagaataaaaaaagattagattatgaaattcaatacgtaaacttgtttactccgccaaaagaagatttaaaaattattattgacgattacaataagattaatgaaaaaataaaaaatggattagctcacgaaataagtgaatctgatacactttatttaggagcatgcacaaaaggaaacactgcagcatcatcaatagtaccacagtactacggtgatcacattccagcaaagaaacgtaatttttgttttaaaagaagttacatggactatgttctacaaaattatgttttgaaagatgaagtaccatctgaaagcataattaaaaataaaaatgatttagaaaatataacatttgataattttattattaacaagattaataattatcgtggcaaaacagataagcaactatgtaatttgtttgatcgtgaatacaataaaaataaagctcaatggattgatttagcatacagaatgcttggaataaaaggtagttcagccgaagaattcaaaaaagcaaatattatagtaaaagccatacgaatagagaagaatggtaagaatcgtgaaagcatgtcatttccaccatttaaatttatggaactggttaaagaaacatgggataattccactttatttaattactttgacacaacaagatttctttttgttgtattcgaatcaaatggcgattcttatacattaaaaggggcaaagatttggaatatgccatatcatgatttaaatacaatagttaaatcagaatgggaacaaattaaatcaatcataattaatggtgtggaactgaaaaaatgtgagacagcaaatggaatttattattcaaataacttccaaaaaaaatcacaaactcaaataattcatataagaccacatgctcaaaaagccgcttacaaattgcacgatggtactataataggtaattatttaaaagatgctaacatcttacctaatggtgattatatgacaacacaaagtttttggataaataatgaatatatcttaaaacaaattaatttataaatggagagaaaacaatggaaatatatacaatatctgagcttgcaaaaaatttaaaattaaactatcccgacttttttacaaatgaaactaatataaaaagaagtcataatattaaaactttgattgattttataaacaaggatatcaaagaaaacgaactagaatatagaaaaaaagaaagacgcatacaattatatgaaacagatgataatgaacaaatatatatacaatatcctggcaaatattcaagtaccaaaaaccctattacttttgatttcagaccaattgctattctaaaaaataacgataaatctattgatatggattttgaaatgatttgggatatattgattaaatattacggtgaacatacaaactttacatatatcataaattccatactttttcgtatgggtagaatgtatcaatatcactttgttgataatgaatcttataattccttctttatcataaatgaaacagaaataaaacaagacaaaaattttaaattgccattatataaattaattttcaatgatgctaaaattatggaatcaattagattccatggagaaaaattagatgcaggaaataacaataagatgtctattgaagctttcctattttatttagaattattactacaaatagaagattgtaagtataatgaagatgaaaagactcctaaagaaaaaggaagaatatcaagtaccgattctcttatattaataaccgcaacgatggcaaaaaaaataagattatctaatttattaatgagatttgttaggtataaaggagttgcaagagttgatagtctagatgaatacaaaaatgtatccaataatattgttaatataacttatcccctgtcaaatcttaaagaaatctgtaaagaaaatgaaattctgttaaataactgcaataagagtatacctggatttcctaaaatcaaatatataattaagaataaaagaataatgattggtgaagattttgataacaaaaatattttagcacttgattatctaaataataataactacacatattttgatattattgattttgtagatagagaaaaagttataaacaaagtcgtttcaaagccaaatttatatgattacagcacagtgttacaaacaataaaaaactactgcaaagaaatgaatattgagtataattcatcatttattggtgataaagagcttaaagaattagcaaaaaaagttggtaaagataaattagcgattaagctaattaaagagaaaatttttattggttctataataattagtgatttagaagattatgtgagtaattggaaatatgtttatattcctaaatatgtcaatgatgaagaattaaatcgtatcaaagacaaatgtttcaaataaccatactaataatttgttaacttataattgaaaatgatgaatacttctcctaataattcataacgttctgcaataatccttcatgactttgttgcaccttataattttaattatcaactgaaataattagattcattcacaaatacattttcattattaatatccattgcctatcattactgaaaaagaggacatcaaccgtagtcaatgtccttctcaacctacgcatatattatcatattattaaacatctgtcagcaagattgtcacctagaatcacaaaaatatattaacttaatttacattaaacgaggaggtatatctatatgttaaacaaaacaatgcagtcactaaaaaaagaaatagatgattccattaaagatttagtcaatattattaaactttataaaccagtagaactattatattatttgaaatcaatggagatggttcctgatatatctgagtttcatgaagatacactattaattaaacaagatcgtatgcaaacaaatatgattgaatattttataaacttattaacagtatttaatattagcgattttaaaaacatggatgtcaatgaatcaatagtttatgatttaaaatcaaaatatatgaacattatggcgcttatgcatcaatattttttattgcataccaatagtgatgaatttaaactggaacatgatgatgtagaaattgattatatgtacaatagattcatctactcgtgcgtgacgggaaaacgatataactgttttgaaaacaaattctataacactatgttaaagatacatattgatgaaattgaaaaaatttttaatattaataaagtatcattttttagtggcttgaataaaattatgaataaatcttccggaaacaaatttctagagggaatggaactgttaaaagaattaatggattcatttgaagaaaataagatacccattgacaagattagcgattatgatgatttgatttctgaaaatgaaaaacaaaaaatagttgaagcctttacttatgaacaatatattatagattcacaagaaatttggaacaaaaacctgctagaggctctttctatcaattttggtgataatacaatgttctttgacggtgattatgcagggtggcctataaataatacattacataaatatcgacctattataaagattgataatgactatttctgtttcgactattataattttgtggataatttttatagaactatttataaagcaattgtaagcaaagataaaaaatatgcacaaacatggcaaaagttgcaaaaagaagttactgaaaatcaagttggaaaaatatttaaaacaatttttccaaatgcagacgtactacttgataattattactatgtagataatattaaaagcaaccgcagtgaaaatgatattattgttctatatgattctactctttttatcatagaagtaaaagctggtaactacacgcctgacaacccatttgtaaacttttcatctcataaaaaatctataactgaactaattgaaaaacctaatcagcaatgcaatgctcttttgaattatctagaaaaatatcaagatatttacaatgaaaaaaatgaagttaaatatcaaataaacatagataattataaaaatatctttttattctccgtaacattagagaatttcaacgaagtttcctctattattgagaaattcgaaaatattaactttaatagaggcaattttcttatctcaattgatgatttatacatttactcagattattttgctaatcaacccatcccttttttagactatttaaaatatagatacaatgttaccaaatctaaaaacttacatgtcaacgatgaactagattatcttggattgtatttatcttatagagatttcccaaaagaagtagaggaattaatagaaaaagaggatcttgatggtacaacagaagttttttttaaagatgcaagatatgaattagattcttattatgatagcaaacagacacctctatcaattcagaaaccaaaaccagcatggttagaagctgaaatggaacaactaattaacttagtatataaatccaaacatgtgaagaagctagaacttattgaattattacttgatgttgcttatgaaacacatttaacaactgattcatatttaaaaagcgttattaataaaattaaatctgcacaagcaaaagttgaagacaatctatttgtttctaccgtaacagtaaattcttcagaaataaatttagtatatccttatgtcaaattaactaatcaaatcattaatacagcaaaaatgcgttctttagccaaacttaaacttaatcatctagatgaatcatatataatatttattgaacttaataaggacaggaaactttcaaaaattaaaattgaatacattcaattctctgacattaaaaacagaaaccagaaaactttggatgatattggtaagaaaatatttaatcttagaaaagaaaacttaatgggaagacttagcgttacaatatatccagatagtgagacatgcccatgcggatcaaaaaaaccatatggtgaatgttgtaaactaaaagggttataaataattatttggggacaaaaattcatacaactaataatatttgagtttatttcctttaaatttaaaattaaaaagatacccattataatgagtatcctacttcataagtctaaatatgccttataggtttatggattaattccatatcaggcagtaatcatattaaatacgattactaggtgccattctatgatggctcttcttatccaagttttctttgataatcttctaattcgtgaaagactcttaatatcgtaattgcttcgtttgtgtcatcaacaatataaacaaagatataagattttataactagtttatgataattaaaaccatgttgcgaatatacaattggactaatatgaggatgatgtttgatcatcctcattttttcttgaattgcgttatcaaaattatctataacttgcggactacgataactagataaataattcattatttttcttaaatcttcaattgcaaattcattgtaaataattttataacttgtagccatattcttttctaaacattgcccaaacttcttcttctggataattctttccttctttataagatttttcagcttcttccaatttttcttctattgtctttggaggttgttgaaataaatcattatttttatctaatcttaatggttccatatatagccctccttctcgtcatcattataacattcattatgcaagatataaacatttttcaatcaaaaactttctttttaaattaccaataagtatagtaataattaatactccatttatcatatgttgaataacataaataacttgaaacatatctactttcatcactaaaatcatccatttttctttcagcttcattagtcgcttcttgttcagtgtcaaacaattcaccacaattacctacctcatactttttcgcaacttcttcttttggttgttctacttgttgaggtggtattggattagtttcttctaatactttattaggtaaacttgtagatggttggttactatttgtgatagaagaactattttcatcattttgtttatcaatcttgtcattaacatttgtttcaccattagtatatgattttttatcatttatattttcttgaataacttcatctttatcattttctttagtttcatcagttgtttgagctggttcaacatcgtcttcaattataggttgattataatctctatttgttttagacaatgaataattatttaaataagctaatattcctattagtacaacagcgattattattatctttttcacgattatccttctctctatagtttgagcgtttttaatgcattcaacaatgataaagcttctccattcgttaaggtagtacctttaccaatcttttcatgattaggtgcccaatctctaatttctaatttaggattattttcaccccattttacgatatttaactcttttgtccattctttactgcctttagaaagaatagcaatttcttttactattttaaattccattttatattctccaatctaattgttagttaattcattgaatatgatttcttcaaccatactcttgatattgttcatttcttgaacccatctcatttgattagttgcttttaattgttcatttacatgatatagttcttggtattgcattattaatcggtcatacattgcatttgcttctttatcaatatctactagataatcatttaatttgttagttgctaataatgagaagtaaacaccagcatcatgttttttcaaataatcacgcttcatcatgccatatttaccaattggtttactttcaggcagtttaacatcggggatgtaataatctcctactttactatattttactttattcatctttctctttgtcctttcgatttattttgttctaattcttgattttgtctttcataactgagtgttctatctttaatgaaattacatgttttaatttcttttcttaactgtttaatttttggagtatatgcagttgcttttgtactccaattactcatttcaattggattaatacacttacttcttttgtaataacatctttgtctttctttaagtagaacatttaattctacttgtgctttactttgatgttgagctatatcatctaatgagtgaatatcatatttaaacattaaattaacactgttactatacatatcaagtttcttaagtgcttctaaagtttccttggaatgctttctaggttttaaatgatgttgaggcattataccaatgagtattgcccatttaacataagtatattgaataccagttaatttcttttgcttatagagttgaaagatatatggttcattttgaacattatacttactacctgaataataagtgttatatttactaccatcttttaaaactctactattgatagaatcataattatatctttctcctaacatagttatttgaataggtttgtcataacgaggatgtctaatacattccatttcattgaccatctcaaaaatatacccttccatcttcatagcatcataaacttgtttagtaagaaatgattttttaataattaaatcaaagtcatgttttatttctttaataaatgattgcgtagcttgataattatttttattacgttttccatattcagggttttcaataactgacaatccatattctttacataatctatctgacacagttctcattaagtatcggtcatgtttagtattgcaaaatcttttaccatccacaaatgatgttgcattcacaataaaatgattatgataatacttcttatctaaatgcgtagttacgacaacttcaaacttatcaccaaataattctcttgcagttttaacacctatttcgtgaatcatatcaggagttccttctcctggtttaaatgattgatatccatgatatgctaatctttgtttgtgatcattgaacaactctttagtcttcatcatatggccatatggattatcataataacagtttatacaactaatatattggtcattggttttaccatcttgaattgcatagtctattacttttgagatggttttatctttatcttcaacataatcaatgacatggtccaatctcgatttaacagcccacatacttgtcactgccataagctatcctcttacggctttatcaacattactaatcatggttcttaattcacttatacatgatgatattcctagttcgtcaatttgatttatattgactcgtttagttaattgattaagattattaccaatatgattgaactcttctattagtttataataaccgatatttggagcagtctgaaacttcgttttcttaatacaatttctaatgaagcgttctcttgaaagtttagattcattaaccttatccatcaaatcaagatactcttcgtcactcaatctaactttaatacaatgatttctttgcatagaaatcactcctttccggtggtattttggggacaaaatacgttgcttgctaatacaactaatccccttaatttataaaatataccaactgaaaagataagtgttttatttttccagttagtatcatattcttgtaaaatgatagccaaattgctataattttaacgacaattaattgctttgttcattgtcacttagtgacagttatgacagttgtgacggttttggggaggcctcctctttactgtcattgctgtcattactgtcatcatcaacataagttaagattacttttcgcattgttgaagagcgttcgaattctacttcaacatttgcattttgtaattcatacttatgtttttttattttctttgcaagtgctggacccatgattttagacttcagtttgtaagccaagtcaccagtagttccttcatatttttttatatgagcaatataatttgcaatttttacaatatcctcatcattactaatgacattttgctcttcagaaatgatgaagtttaagttttcagttttttcaatattataagattggtcttcgatatccttaccagtaatgtgtaaggtttttttattgttacaacctataacatctaacataactatcattgaatcagcgccagctagtaatccattactaccataaatatttttaaatggatgagcataatcgatatcttgtctaatatgcattactagaacaattgctaaatgatatttaacacctatatcatgaatacaagcaatttccgagtattctgatgcgtagttgaattcactttgttctcttatcttagtaaaagtatcaacaaatacaaccttaagattatctccatattcttccctagctcttaggatttcatcttccaaactaaagtaattaagatcttttataaatgcaaattcaatattattgtcaggttgataacctaacttttcatatcttttatcgattctttttttactatcctctaatgcaatgtagagtacatttgctttttttgtatcaaaacatagatactttaatccttgagttattttataggctaactctagacacataaatgttttgccaccttttggttcagccgcaagcaatgcaacaccttcaacaagtaaattataaatgatgatatcatcatataattcttcagtagtatattgactgagttcatttcctttaacatatatcttatccattgattacctccattaattgacttaagaatgacttacattcatcaattactggtaataattcttcttgtgattcaatagaatctaacttatttaatagtttatttacttctaaacttaaacaatcactagcaaatttacctgctgttatttcaatcttttgtttcataaatgattcaataaagaattgagatttgcttaatcccgttatagctattctttgttcaacgatttctttttcttctggcgatactctaaaattgacaattacacttctttttctatttttatttggacaaggcatattaccacgctccgttgaactgttcttctaatttattcgccaatttatcttgtctatcaggataaagatgtccgtaagagtttatagtagtctcaatttttgcatgacctaatctacgtgatatttcaataatttgcatacccatattaattaacaacgcaacacgggaatgacgtaaatcatgaactctaatttttttcactttactttccttaattcctctagccatctcatgctcaatatatgatttagtaaatggaaataaacgatcatctttatcatcgtaaggtaatacattcatataatcttttatatcatctagtaagaatttaggaatagaaataacacgtttacttttttcagttttaggtacagttataacatcttctccatcgattttttgataagatttattaatatccattgttttcttctcaaaatcaatatcaccgatagttaaagctaatagttctccaactctaatcctcatccaatataaaatcataaatgatacatatgatttttgtttattcatcattgtaacaataaatttatcgaattcttctttagtccaaaatgacatttcatcaggtctatctctgccaatgcttccagctttatgacaaggatttgatggtaagtcgtatattttaacggcataattaaatattgctgataactgattgcaaattgtttttagatatgttggtttataatttgatttcaacatcatcttttgccattctctaatagtcactgcattaatctcagtcattttcaaattacccaaataaggtgttaatttgtaatcgataatatatctttttgttctcatggcatttgccttaattcttccatccaaatcttcataataagcatctacaaattgtgcaaatgtcatatcaagactgggcctttgagctgatgcaaagttgtaataccattgttcagcttctctttttgtaccaaaccctcgttttgtagatttcttccttgctcctgtccaatctgtatatcgatattggatgagccatcttccagtttttggatctttttgtgctttcattcatcttcctcctattctcctgtaaaccatcttttttcaaaatatttagtaggaactcttccagcaacaactaaatatcctttagcagttagttcttcatttagttttctacatatcctatatgctctactaaccgacactcctagcatttccgccatctccgatgctgtaataaatgttttgtctgtcatggttttcacctcctttcaaagatgcaaatcttgtcgattacaaatattattatactaatatttattatgatgtcgatattatatgttataaatattagtatttattatattttattgattttcttatatttatcacttataataataatgacttcaggagaactcagggatactcataagttctcattgttcctgatgaaacctatacatatcgaggagataaatatatatgaacgaaaatacgtttggagaaaaattaaacatattaagaaaagaaatgggtcttactcaaaaagaattttctgcattagttggtattcctcagccttctttatcagcttacgaaaatggtaagaattcacctactgccgatgttttaatgaatattgcagataagtgtaatgtatcgctagattggttatgctctagatcaaacatgagaactaatgtttctactctaggtgatgtctttgcattcttatcagcacttactgaaacagaggaaattaagctagattttactattcatgacaacattcctggggatatggaaacagaaactgaacgttggtatgctgatattcgtgtatacggaaacgacattgaccataaatggaacgctgacctttgtaatatcatcgccaaagtaaatgacaatgatgttaaactatcactaggattactcggtgaggaaacatatgaattagtgaaggagaaaacttataattactacaataagaatccactaaccaaaaaagtaattgaagatatatctatcgaagaaaagaatcgccgcctaactgaatacgtaaataaacaaaatggcaatagatccaaataacggatttattgcctttttttctaataataaataataatgatactattttgatactggtgaaatgagtacttttatcggtttaatacgactatttgcactcaatttgtactcaaaataaataaaaaaaggctgaaaacccagtgtttacggggcttttagcctttgtcttgttattcaaactcaatcgttcctggtggttttgaagtaatatcatacattactctatttaccccacgaacttcattaataattctagacataaccttatttaatacttcataaggaatttgagcagcttctgctgtcatgaaatcaattgtgttaacagctctaagcgcgatagcatgatcataagttctttcatcacccataacccccactgaacgcatatttgtaagagcagcgaagtattgaccgattgaacgatctaatcctgcttttgcaatctcttctctgtaaattgcatcagcatcttgaacgattctaactttttctgctgttacttcaccaatgatccgaataccaagtccaggccctgggaacggttgtctaaatactaagtattcagggattcctaattcaagacctactttacgaacttcatctttgaaaagatcacgtaatggttcaatgatttctttgaaatccactgcatcaggtaagcccccaacattatgatgagatttgattactgctgattcaccacctaatccactttcaacaacatcaggataaatagttccctgaactaagaaatcaacagtcccaatctttttagcttcttcttcaaaaacacgaataaattcttcaccgataattttacgtttggcctcaggttcctcaacaccctttaacttttcataatatctttcttgggcattaactcgaataaagtttaagtcatattgaccatcaggtccaaataccgcttctacttcatcaccttcatttttacgaagtaatccatgatcaacaaaaacacaagttaattggtttcctattgctttagataataataccgctgctactgatgaatcaactccgccagataaagcacataatactttaccattaccaactttttctctaatagctttaatttgttcttcaacaaatgaatccatacgccaatcaccactacaattacatacatctaaaacaaagttagataacatttttgttccgtattcagtatgtaaaacttcgggatggaattggattgcatataacttcttatcttcatcttcacatgaagcaactggacagtctttagtgtaagatgtaatttcaaagcctggagcaatttttgagatataatcaaaatgactcatccagcaaatcgactctaccggcacatctttcattaatttagattcttgtttactaacaattaaatgagatttaccatattctctaacatcagctttttctactttaccacctaacacatgctgcattaactgagccccgtagcataaacctaataccggtatccctaattcaaataattctttttgataagtaggtgaatcttctaaataacaactattaggtccacccgttaatataatccctttaggattcatctctttaatcttttcaatatctactttataagaataaatctcacagtaaacattacactcacgtactcgacgtgctactaattggttatactgaccaccaaaatcaattacaattactaattcatttttcactagctatcctcctatttaaaaatttctcttaacacaattgtttgctctctatcaggaccaacagagaaaattgcaattggacaattaatcaattcttcaattcttcttaaatacttttgacaattttcaggtaattcctcaaaagaagtaaccttagtaatatcttcatcccatcctggcatttcttcataaacaggtttaaccctattcaactgtttaatcgttgaaggtaatgctttgatgattttaccatctaattcataagctgtacagatttttaatgtctttaaccctgataatacatctaataacattaaactaattcccgtcaatgaagacattcttcttgattgattaacaacaacagcatcaaaccatccaattcttcttgctctttttgttaccgtaccatattcatggccacgttcacggatttgatcagccaattcaccttcaatttctgttgggaaagccccactacctactcttgttgtataagccttaacaattcccactgcttcattaatatataatgggccaattccagagccttcagctactccattagcaccgggatgtgaactagtaacaaatgggtatgtaccatagtcaatatctaacattgtcccttgagccccttcaaataatacatttttaccagtttgaaaacattcatctaaaacaacaccagtatcacaaaccattggtgcaatgattttagcatattctttatattcttcaaagatttcctcggcactacatgtaagttcaggatattgcgcttttttagaagccaaagcttcttctaatctttctttaaataattcctcatcaatgaattcacccatacggattcccacccgttcatatttgtcgacatatgtaggtccaattccttttttagtcgttccgatattattagctccacgcctagtttcttgaatttcatcgatttctaaatgataaggtaagataacatgagcccgatcactaatcatgatcttatcagtactaatattagcatcatttaaatatttcatttcttcaagtaaagctttaggattaattaccattccgttacctaaaataacatcattaccactaaaaatccctgaaggaatcaaacgtaaagcaaacttttgaccattaaattcaattgtatgcccggcattattaccaccttgatatctagcaacgatatctgctttttgagccaggtaatcagtaattttacctttaccctcatcgccccattgacttcctactacaacaactccagccattaaattcacacctttcttatttactattacattatatacaataaactaacaaaatgcatcaataaatatacattaatataatagtttgactagtttacagaataattatattatagtcttagctattagtaaaattaatatattataattatgatataaggagaacttatatgtatatcaaactagaacaatacaaaatattcaatgaagctgctacgaccctatctttttcaatcgcagctagaaatctttttatttctcaatctgcagtttcccaaacaatcagcagtattgaaaaagaactacagactcaattatttattcgcaattctaaaggtgttagtttaactaaagagggtaaattattacatcagcaaattgacaaagctttagcattgattaccggagtagaaaaccagttatcaaattatcatgaattaaaagatggtcaattaattattggagccggtgatacttttagtgagtattttttaactaattatatcgttaaattcaaacaactatatcctggggttaaaatcaaagtaatcaaccgaaccagtctagaaacccgtgaattgttgaaatctgatcaaatagatctcggttttttaaatcttcccatcaaagatgattctttagtaattaaagaatgcttccaagttcatgatatttttgtttctaaaaagcctgataatcatatttacaccttcaatcaattagctgataagcccctaattcttttagaaaagtcatcaaatacccgtaatcgtatcgataattactttgctaataagggactattattaaagccaacaattgaacttggagctcataatttattgttggactttgccagagcaggactaggaatttcttgtgtcattaaagaattctcccaagaattacttgatcaagggattcttcatgaaataaaaacatcacaaccattgcctaaacgcagtatcggttatgcttatccaaaacgacgaactcaatctgttgctacaaacaaatttattgaactaattgctaatgatccaactttacatatctaaaaacgtcactgattaatttagtgacgttttttatttatccttttaaccctcttgactgacgttccatatcctcaacaacgatatcatagatttcaccaagtgatgcacaatattccaacacttgccacggttcgttagtatggaaatgaatcttgatcaactcatcatcaccaaccgctaacaaacaatctcctttaaaatgttcagtaatgtaatcattgataacatcttcatcgagatttttaccttcaatcaatagttgagtatcatatctaaattctagcatcttattctcctaattataacctggttgagttaaaaatttataaactcgctcaataatttttgattctaacttattatatgataaagttggatcttttaataaaggtatttcgaaaacatcttttcgtccttgataatcaatcgttactttaataattgatcctaaaggatgttcacggcaatcgattaataaattcattgtatcttcagtatggttgtgaccaagattaaaatcatctctaagcgtaaaattatcacattcataaattgtccaataagatggcattatatttgctaaggcctcttttaaattcttctctttgataatataatcttttaaaatcttttcaatttctgtcttaattggagcaatttttttatcagcagtttctttatcgcttgctttacaacctaatcgaacccgcactgtttcttctgaagcataaagagcaatactaacttcttcttggtgatcaattaaatctgctaagacctcatcaacccgactttcccctattcccatggttagaaaatcatatgtgtaaataatatcctgcttaaattgacttaaataatcttttaaaacatgatcaacaacataagtcatttctttaggcggaccaggcaaattaacaatcatcttttcatctttcgacattacacagccatttgctgtccctacttcattttctaaaatataacaatctttaggaaaaaaagcttgtttaaaattattttccggaatatcaccccatcccgttacaaatcgacatttttcttctacctttttagcttcttcttcattatataataattctaaacccaaatattctgccgataattcttttgttaaatcatcttgggtaggtcctaatcccccagtcgtaattacacaattagcaccacgtttaaaagctacatctagacattctttaaaacgatcatgattatcaccaactgtcgtttgatagtaaacattaaaccccaagtctttacacattttttgaatataagttgcattagtattaacaatttctcctaataacaattctgtcccaacattaattatttcaacattcatgaaattatcctccttaatgattaactatattatagttaattttaatcattttgctagtcttttaatcattaaaattatttcttgcatattttccttctagcacctaagaccaaaggtctagttgaataccaaaataaactaacaaaaatgactaaacaagcaataaaagttaattattagctgaattattcctaaatcgaattcaatatacatatcactcactccctcgtcaacttcacttcaatagtaataaaaaatttctatcagctgacttagcatctctaaataatcgtatttggcaataaactgactatcacaaaatgctaaaataaaatctttgataatagtacttttgaattctaataaccccttatcaataatagttgctatcctcactttcggactatccaaatattacttatagcgatttacactctataaacgtttcagtccttcatcatttctgactgctatgacttcatctgatttcttgtgataaatctttttctatcgatggtatcattactgtttttaaagtttactggacttcatcgtccacaaggcctcccgaggtaaggcatacatcctttttatcttcacaggtttttgatttactgtcttggttttacgtttaccttttggacttggtttgttctgcaaccttgtccaccattcagcctcatcaaatttcttttcgtaacctcgaagatttttccacaccacttcctccgcccatagcatcactactaacggcttgtggttcactactcttggcggtaaatacccgtggttggactttcaccagctagatgtatgccatgctcgacacacagaaaaagaagtcattggttttacaatcaataacttcttttttatattttaactattgaatcttagataatccaagaacaatgattcctcctaaaataactgcaataattgatgtcacaactaaacttaaattataacttacatcaaaaggaatcaatactaatgatgaagcaacgatcaatcctaaaatcaaactcaagaatccagctttatgagttttagtgaaatatgaacataattttgcactaacaactattcctacagcaataccaattgccataaatcctagcggcataataacatccagactaaaactagtaacatttgctagataagacttaaatagataatattctcctaaaattaataaaaccatactaccgctaacaccgggcataatcatagttgctcctgatacggcaccaataattatcattttaacaaacaaaccagcacttagagcaggaaaatcaggattaacaactactttcccttctccaggatttaaaaattctaacccaaagataattgctaaaccacaaataaaagggataattacaagtttttcacctttcatttccccttttaaaaataaaggaatactaaaagcaatcaaaccaataaaccaataaatcgtctgcgttggataatattcaaataacacttccaatattttcgcaaatccaattattccaactccagcgccaaccaaaacctgaaaaataaagataatatcttctttgcgattaggattttcttttttaaagattccactaatagcatccatcatgcgattaaagatacctagaattaccatcatggttccaccactaacgcctggaataacgttagcaataccaacagcgattccgccaattatgttttttatcattgaaacttctcctttaaatacctcatcattataataaaatatcaccattatcacaagcagtattttatttcccttttaaaatcaagtgataaattgcttcttcactctctaaatcataatctcctaaatggctgttaggataatggtaaattactccattagactcatttttccttaaacaaacaattaatttttcttccccatattgtccaataaatttacaaaatgttctaatccgtaacttgtgtaaaatactatcctgacaaggaaaatcaggacattggcaacaactatcatatcctgactttgtgcagcactgataatttttacaaaaatccttttctggacacccaccttttttacaaccaacacaactttcattttcactacacagcccacaaacaagaccacaatatcctaatcctaattcatccttcatatttaatccctaatccttatgatgctttcgtaaatattcaatttgttccatccgtttaatcacctttgcctctgttccttgattagtaggaaaataataacgatgatccttaatattatctggtaaacactgcatatttgtaattttatcatcataatcatgcgcatactgataacctttaccataatttaattctttcattaatttagttggcgcattgcgaatttgtaaaggaacgggatcagcaattgtattcaaagcgtcatgttttgctcgttcatatgctttatataacgcattagatttaggtgccaaggccatataagttacacaatgagctaaattaacattacattctggcatgccattataatggcatgcttgatatgttgctactgcaatttccaaagcacgactatcagccattccaatatcctctgaagcaaatcgaatcagcctccttgctacatatagaggatcttcaccagcttcaatcattcgtgacatccaataaattgaagcatcaatatcactattacgcattgatttatgcaaagcactaataatattataatgttcttcaccttttttatcatataataaagatttttgattgatacattgttcaatcgtttctttatccactacgattcgatcatgagtaattgctccatttaagactgccatctctaaagtatttaaagcaactcgagcgtcaccgttagaaaaaccagcaatcatgtataataaatcatcatcaatcataacattttgatctttaaaccctttcggacttatcagcgcataatgcaataaaccaaataaatcatcggttgttagtgcttttaaaacaaaaactttacatcttgataataaggcagaattaatctcaaatgaaggattttcagtagtagccccaattaatataatactcccctgttcaacatatggtaaaaaagcatcttgttgagctttattaaagcgatgaatttcatctacaaagacgattgttttttcgcctagatcctgaacttcctgtgcttgtttcataactgcccgtatatctttaatgccgctagtcaccgcactaaaattaataaacttagcttttgtttgatttgcaataatgcgtgctaaagttgttttcccaactcccggtggtccccaaaaaaccattgagggaacaacatcactattgattagctggtacaaaatctttcccggtccaattaagtgcctctgtcctacatattcagtcaaagttgttggtcttaggcgatttgccagtggttcatttgacatgtttttaaacattgcttgctgcttcatcatcatcacttccatttccttataattataactaattcccgctttaaaagcaaaaaaagaaacagttgtttaaactgtttctattcatctgatccctcgaattgagaacgatacaatgaggcatagaagccatctttagccaataatgaatcatgatttccaagttctacaatgtcaccatctttcattacaataattgtgtcagcatcacgaattgttgataaacgatgggcaatgacaaaacttgttcttccctccattagcttttccattcctttttgaattaatacttctgttcttgtatctactgaagaagttgcttcatcaagaatcaaaatttttggattttttaagaaagcacgtgcaattgttaaaagttgtttttgcccttgagaaatgttagatgattcctcattgatcattgtttcatatccattctctaatgtttgtacaaaatgatcaacataagcgactttacaagcctccttgacttcttcatcacttgcatctaattttccatacattaggttttccttaattgttccattaaacaaccaagtatcttgtaaaaccattccaaataatgatcgtaaatcctgacgtccaaaatcacgaatatctttaccatcaataagaatcgaaccactatttaattcatagaatcgcattaataattttacgatcgttgtttttccagcaccagtcggtcctacaattgcaacagtttgccccgcatgaacatgtaaactaaaatcattaataatcgtttgatcttttaaatacccaaaattaacatcagcaaaggtaacagaaccttcaactttagccacctcatcagcagtaacttttggtgtttctggttctaattcttcttcacctaaaaattcaaaaacacgttcagccgctgctgctgtactttgtaacatattcattgtctgtgctaattgtgttattggttgattaaattgtcttacatattgaataaaggcctgaatatcaccaattgtgatactaccatcaccagcaagaacaccacctaataaacataccgcaacgtatccaacatttccaacaaatcctgtgattggctgcatcaaacccgaaaagaattgtgacttccaagcactttcatataaattatcattatactcattaaattgttctactgaagcagcttcaccattaaatgctttaaccacattatgaccaccatacatttcttcaatatgaccattgacatcacctaaagcagcttgttgacgcgcaaaatatttttgtgaacgtttcattactaaaccaatcaaaaccattgatactggtaatacgcaaactgcgatcaaagtcataactggtgaaatagtcaacatcatgataaagattccaattaccgttactgtcgacgtaattacctgtgacatactttgatttagtgattgtgcgattgtatcgatatcatttgttactcggcttaaaatatcaccactagtatgtttatcaaaataacttaatggcatccgatccatcttttgagaaattgatgttcttaaatcataagcaactcgttgtgaaatagttgaagtaataaaaccttgtatataactaaataaagcactaatcaaatacaatccaactaaaatcaaaataatttgaccaatataatcaaaatcaattccaccagtaccagctactttagccatgataccttcacttaatttatctgttgctttagctaaaatctttggtcctacgattgcaaaaaccgttgatgctgaagcaaaaatcacaactataactaaacgaaaataatacggtcttaaatatttaaataatttacctaaagtacctttaaaatctttagctttttcaccgccacgcattccgtgcataccaccaggtccgaatttaggaccatttctttttggttgattactcatgtcctaattcctcctttgataattgtgaatatgcgatttcttgatagacatcgcaatttttcattaactcttcatgggttccttttccaacaatcttaccttcatctaaaacaatgatttgttcagctcccataattgaagcaatacgttgtccgacaatcaatactgtatttttagtcttcttaaccatcttatctaattcttgacgtaatttagcatctgtcttgaaatctagagctgaaaaactatcatcaaaaataaagatttctggatttttagcaatagctcgagcaattgctaaacgttgtttttgaccgccagatacatttgttccaccttgtgaaatttcactatctaatctttcttctttattatcaataaattcttttgcctgagctacccgaattacttcttcaagttcatcgtctgtagcctcaggtgcaccataagttaaatttgatctaatggttcctgagaataataatcctttttgaggtactaaaccgattttatctcttaaatcatgttgattaacatcacgaatatcaacaccatcaatcttaatattaccttcagttacttcataaaagcgaggaattaaattgattaacgtacttttaccggatcccgttgaaccgataaatgctgtagtttcgccaggttttgcagtaaaactaatattttctaatactgcttcattagcaccaggatatttaaatgtaacattattgaattcaactaaaccttttttactttcaataaaagctttaggttccttaggatcaacaattttaggttccattgaaataacttcataaatacgatctgctgctacactagcccgtggcaacataattgaaatcattgcaatcatcaaaaatgacataataatttgcattgcatactgcataaaagccatcatttgtccgattgcaatattacctaaatcaatttgttttgctccataatatacaatcaataatgttaccacattaaaaatgaacatcataatcggcattaatgaagccattgttcgattgacaaacaaattgacatttgttagatcaccattagccttttcaaatctttcttcactatgcttttcattaccaaatgccctaattactagcatacctgaaagattttcccgcattgttaaatttaaacggtcaattaatgattgtacgatcttaaactttggcatcacaattgcaaaagtaacaccaatcaaacaaaaaatcaccaataaaactaaaccaataatccaagtcattgatggtgtattattaaaagctttgatcaaggccccaattcccatcattggagcaaaacatactattcgaatgaacataattacgaccatttgtacttgggtaatatcattcgttgttcttgtaatcagtgatgcagttgaaaacttattgaattcttcatttgaaaaactttcaactttctcaaaaacatcacgacgtaataatctcgaaacaccagccccaaccttactagccaagaacccacaagcaacagcacatacagtaccagctaatgcaattgctaacatttttaacccagaccataaaatatagtcattttgaatcttatcagtatcacaacctagtctagaatattctgcttttacaccgttaccggcagcaatttttaaagttgattcacccatcgtttccatctgactatcaattttactaaacattttagctttagttgtattatccatcattgctaaagcatcgtaaggtgtcatatttggcggtaattgcccaaactgttcttgatattctttactatttttatccattccatcaattgatgttaccatcaacattggtttaactaaaatactctctaaacggtctaattttttttcacttagatcttttaatttatagatattttgaccttttgctttaggaaacttatctaaagtatctttatcaagattactgggttcaactaatttatatgcatccataaattgttgctgatcctcttcatccatcagtactaataaatgattatatgtttcttcactcaaaacatcacttactgcactatcaaagccaccagcctgaattcctaccgaaacgatatccgacatataatcaggtaatgctaattctgattgtgattgtaagaataataatcctacacaaagtagaattggtgcccaaaactttttaaaataatgttttaattttagcattattcttctcctttacatttttcaatattctttttcatgatattaataacatcattaataacagttatctgttccttagaaaccccttcaaacataatcattgttttttctttcataattttgattgccgcctcaataaatacctctccagtttttgtaatatttaaaatataattacgtttatcatttttatcttgtgttctagttaaataacccagtttttcaaggcgctgcaatctcactgataaagtcgctttagtaatatttaacttctttgctaaagcattttgattaatgttttgatgattctgcaacataaataataaccttgtttgatccggtgatatatcaaacttttctgttttttccatcatcatataatgcattgttttatttaacccttgaaaattattaattacttcttcaacatcatcaaaacttatctcttccatgatgtacctcctttcattagttagatgactaactattccgttagtacactaaccattatagttagtctactaaccattgtcaactattttataatcaagtagcgaaaaattttaaataattttcctctcttacaccactgtccatacggttccatatacggcagtttaattaaatttcaatttatatctcaataaataataatccaaacaactaactagtctttatgtgctagcctttcttttgctacagcacgcacaacacatgttttagttatcacgaattaatagcgtatgatatttgtcttgctctaccatgattgacccaagttttctaacaccatgactaggctttggtatttcaaaccttttaacaggttgtggtttgtaaaaccttgtttcgatttatcttttgatgtctttctagttttaattaacataatcttttatttcatcattggctacattatccacacgacttgtacttttatagacaagtatcatatttttcttagataagacttcctctaataatttagacataatttgcatgctcttctccttttcactttctaatgcctagatcctagtgtatatgtcctttggctcaaatacatttccgatgcactatgcgattcgtcgacaactacgttcacgaaggactttcaccctaaatgtatgacaagtcgtcatacttaaaaagatgtcaaatttgacatcttaatcaactaaatatttttctagtaatcttactacttcagcaattaaatcatcacaagtagcacgattaacttttttatttgtttgccgtaatcctagtagttctccacaaaccactgatccatgagaatcttcaaattctttacacaaagctgctactttttcattaacaaattttttttgtttaacatctgcttcacctttaccatatttaagtcctaaagccatagccccaccagttaaagttccgcaaatttctcttgtcatcccgacaccgccaccaaaaccataagcaatagtcattgccctatccatatctaaatcaaataaatccacatatgccccaagtactgcctgagcgcagttataacctgaatgatgtaaagcatatgcttttttcactctttcatcaatattcataatttagcctcacttttatataatttaattatagtttagtgataattataatcgatgtcaagacattaacaattatgtattcgtcttgaatctaaccctttagaaaaaactcaccatacaataaatcatgatcagaaaatgatgattttttcaaaccacaattctttaattcaaaaaaatctgcataaaaaatattatcaggtgctgcaaattcgcagaaagtcttgtattttttattctcgttgatacactttaccccttccattttaaatttattgttcattttaaatgaattaaaatcaccagctaagatgctgtaactgttaaaatcaacatgcttttttacataatccatttgtttaatacgatattgattatccgcataagttaaatgggtattataaatattaattatctgctcattaaaatagagctttgttcttgtaaggatacgcggttcccttattatgctatttggtaatcgttgagccataacttctattatagaatatttacttaagattcccaaaccatagtaaccacttaaaatccacatggtaggataaaaataataataacaatatccactagaatttgtcatgatttttagcatgtcaaaattgtctgaacgtaaagaattcttatctacctcctgcaaacaaataatatcaagttttaaatcaataatatccttattaaaactttttaaatcatttttcccataatttaaggattttatgttatatgttcctatcctcaaggtattagtctttgaattttgaatctttttttgatcaacaaatttataacaatactcattagttaagatgctataataataacgacctgatattatcatcaataatatcttaattattaatttaaactgtttattcatttatttacctcaattatttactaatttattattggataaattagtaattttaatacaatcaaaatatttatctaactttcaaaattctaatctgattcaactaaaaataaaaaagatatagacagttaatttgcctatatctatcttatttgcccattcccaaatattttatattttgttgatgtcatttcctgcagtccaattgggccacgtgcatgtaatttttgagtactaattccaacttcagcgccaaatccaaattctccaccatcagtaaaacgagttgaagcattatgataaacacaggcagaatctaaagaatccataaaatatctagctgtatcttcattatcagtaataatactttcagaatgtttggttgaataatcatagatatgctcaatcgcttcattgatatcattcacaactttaatattacaaatataatcatcatattcagtagcataattcttggttgttgccttattgccttctagatattttaaaactatttcatcaccaaatatcttaattttatcaaaccttggttttaataacgttaaaaattcatttgcaacaccttgatgaactaaaatagtttcaatcgcattacaaactgaaggacgagaaattttagcattaactgcaacttcaacagccatttctaaatcagcttcttgatcaatgtatagatgacaaattcctgcaccagtttcaattactgggacagttgcattatttacaacatgttgaatcaaccctgctcccccccgaggaacgacaacatctatataattattggctgtgataacttcagtaacaacactacgatctgttttctcaatcaaattaacaacattttcaggtaaaatatttgtgattgcctctttgattacccttactagagcaatattagaattaatcgcttcttttccgccttttagaatacaaacattatttgtctttatacaaatagcagctatgtcaactgtaacattagggcgagattcataaatagtagctactgttccaatgggaatacgaacttgtttaatgattaagccatttggacgttttatctcacgaacaacttcaccaatgcaatcatgtaatccagctacttttaaaacatcattagcaatactttcaatacgtgacctagttaataaaagtcgatcaaccattgcctcactgattccgttttccttggcgcaagcaacatccttcttattttcggccacgatataatcaatattagaaatcaaatttttactaatagcttctaaagcttttattttggtatctttatcaatattttgcatctttcgacaagctagtttagcctgttttaattgttcttctatcattaatttttcactccttctactaataccaggttatttgcgtgaactacttcatcataatctttataatgtaaaacatcctcgatttcactagtgttcaatcctttaatcaatcttatctcatcacttgagtaatttaccattccacgtgctaacagactatcattaccatcaacaatatcaataatctgcgaaattaaaaaatttcctcttacctcaataattcccttaggcaacaaacttgagtggcatgtaactaatgcttttttagcaccttcatcaacaacgattgttccttttggcatacttcgatacataatccaatgttgtctagaattaaggagtcttccaggtttaccatcaaaataagtacccacatcttttccttcaatcagatcaatcaaaacgtttggttggttaccattaacaatagccatatcacagccaaagtcattacaaactttagctgctctaatcttagtaatcattcctccagttccaaccttgcttgaagcatcttttgccatgctttcaatttctttagtaatcccatcgacattacgaatcaatcttgcattcttattcgtatgtggattatcatcatataatccatcaatatcactgactagtacaaccatatctgcattaacagccggtactaccagtgatgctaatgtatcattatcaccaactttaatttcttcgaccgctaaagtatcattttcattaataattggaactacgtcatattcaatcaatgcctgcattgcattgttaaaattcatcaaccgcttacgatcatcaaaatcatcatgatttaataaaatttgtgcacattttaaattaaataagctaaataaatcttcatatatttgcattaatgaagcctgtccaatagctgccagagcttgcttttgaggaatagtttgcgggcgacattcaagattcattacatgaactccagcattaatagcaccactgctgactaatgtaatacttatccctttacgcttaatatatgctatttgttgaattaaatttaaaattttctctttattaatattcccttcatcatcacataatgatgatgaacctattttaataattagatttttaatattgcttaaatctcgcattctaacttccccctgtaattattttcttaattatacaaggtttatctcatcttctcaacaaaaaagtgtttaagcataaattactcaaacactttatctatcgatttcaacttcataaatatatttaaattcaccattgacctttagcataaatttattacaagtatactcgatttcaaaaacgtgaatgcacttgtttgctaatatagctgtttcaccagttagagcaatttttaaagttccatttttattctatataacaattttttcataatcaatattttgaccaactaaaattagatatttttttattatttattcaatcattatcaatatgtgcattttctcaaaaataaaaatcagtatatactaaaacttttttagtattgttattgtgattctttagccacttttaatagattatcactcttaacctctaaatcataatcaaaattataattatccaaattagcagcaaagatttctaaccccatttcaatcaaaaaatcataataatacatatcatcgttgtatattgaagataatttgtgctttgattaaataatatatatgttttattttcacaaatttatacatgtacttttaaaattaccagatctcgataattaaaatgtagaattgccagccattggcaactatcataagtaatatttttcttttcttgtgttgaaaccaaattcaaccatctaataactccttataactcaattctaaagcttttgcaagtattggatatcgtgatagctcccatttgctgattatcttgtctgatacacataatttttctccaaattctttttgtgtcaaacctttctcttttcataactccatcatgaaggatccacatttttcattatctatattgctcatatctttcactccttgagcctatactactattaaaattctgattattcaatcaaccatcggtagagtttatatttatgacaaaattacttatatataaaactaatcagaatatttagcttttattttctgattaatttccaattttcaaaaatatgatctttttttgttacagtgtttctaacaattccaataatttatcagcatgcataactgctttttctttcatttcagccattttttcaatatcatttctattttgataagatactccgcctgtatagacatatccaaagtaatccaatccacacaaattacacattgcctttatcggcgggaggaaatcttcaataggatatttctgtgccccttcataactatacataaattctggagcaccagtcgtaaaagaagcaatcaatttctttcctttcaatttatcaccggttgaaccgtgggaaaagccatgctgaaatgtttcttcaagccagcgacttagtaatgaaggcatagcataccagaaaataggaaattgcaaaacaattatatctgcatttaaaagtttttcttgctctgcttcaacatcaatttgaaaatctgaataaagtttgtctaaatagacaaattcagcctgtggtaatttattttcaaacctttctaatattgccttatttgcaacagaattatttaagtctgtgtgtccagatactactaatatattttgcataagtcattacttatattttgcataagtcattactccttttatttcatttttttaacccaatcagataattcatctgcactaacattttcgtcaaatctttgccctttcatcaaacgagcacccttgcatgaattttctaaataatcgtttgtttttcccattccgctcattccagatgtcgcaaatggaataattgttttaccccttaaatcgtattgttcaagaaaagtattgatgattgtaggagcaatataccaccagataggaaatcctaaatagattatgtcatattctcccatatcacttattttttctttaacggctggtctgaacgatttatcgttcatttctactgatgaacggcttttaggatttgtccaattcaaatcagcacttgtgtaaggttgttctggtacgatttcaaacaaattcccctgcacaacttcatttaatctttctgctacttttttggttacaccacttgcactaaaatacgctactaaagatttactcatttttacactactccttttcatattctacttgtgttaatataaaattatctgttctgaaaaagtctggtgctgttgcacttaccttttgatgagcaacactctgaataactttgtcaaaatcttgtttactttctacatcaatcgtcatagtaacaacatcacttagaccaatccaccctgtacttttttctacgataatttctttgatttccggaagttcatttttcatgcttctcatcaattccatttctttttggatttcactgtcagttactccctctttgattgttgcaataaaaatatgtcttatcatttttcatctctcctttttatttctgcccgacatgaaacattttgaaaaatttatcaatatcctctgcattttcgtggttcataaatacattttcacccaagtccaattcttcaatttttttcatttcttcatctgatagtgaaaaatcaaatatattaaagttttcttccattctatttttatgagccgacttaggaatagcgattattccattctgaattagaaaacgtaatgctacttgcccgattgttttattatgctgttttgcaattttcattaaaacttcattctcaaaaataccttgactacctctggcaaatggtgcccatgcttccaattttgttccatatctctctaaaaactttttatcatttttatgctgttggaaaacatgagtttctaattgatttaccataggcttaatttcactgaaagttgctaaatccataaatctgtcgaggtaaaaattagacactcctattgcccttacttttcctaatttatatgcttcctctaaggctttccatattccgtaatagtcattgaacgcctgatgaataagaactaaatcaatgtattctatctgtaattttttcaaagactcatgaagcgaagcctttgccttttcatatccagcattttcaatccaaatctttgttgtaataaataattcttctctaggtacaccacattttatgattgcattaccaacaccttcttcattgtaatatgcttgtgctgtatcaatcagtctatatccagttttaattgcttccaaaacgcaacgctctgtttcctcattgctcattgtgaatgttacatatccaagtgcaggcatttttacgccattgcttaaagtgataaactccatttttttcaattccttttcatttacgcattctgtaattcatgccgtaaaaaatctatttcctgtaattgattttcttttacatgaatttcttcaagaatttttctacgtttttcgcttactatctgtattcgtttttcttttgttgaagtgcctaaatgtgaaagtctaatatataattcaatttctgcatttgtgaaccccaaatcattaaggattgtattgtatttttcacccctcatgtaaaggttcaattttccacccctttcaaagaaaataggtgcaccaagatagcgggttatcttgttacacctatattttaaagttcattcattgatatgtctaatgcttatgttgaattaacagaaatacaaatattgaatttctattttaattatgtttatagcagtcttttataaaactgataaaggtatttgttgccttagaatatgattgacggtctttccatgcaagtacagaagttaattcaagtttaggttcaaaaggaataaacttcatgtcatcataataattatctaacttcacacagataactgctccttttttctctttggcaacaattacagcattatacaatagattataatttgcacatgattccatttctttcgcaaaattccctgaccaacttgccaactcatgatgaactggcgtatcaaggtgtattgttataacctttgtgcctactaattcaccagggtagattacctgtttcttagaaaggggattatctttatgaatgagaacgccccattgttcttttgtcctcatacggataaaatcatactttacgacattcactggttctaataacaagcccaagtctaaagtaccttgttccatacgttccttaatattttcgttgtttccgctatataactcaaattgtacgaaagggtatatgttttgaaaatcagtgataagttttgcgatttcttgtgcacttctcatttctccacagccaattgcaatgtttcctgataatacatcagtatcttgttttaattccgcctgtgccttatctgccaaattcacgatttcctgtgctctacggcgaaataataagccgtcatttgttaagtatatactatgattactcctttgaaacaatttgacacccaattcttcctctagctgcataagctgccttgaaagcgtaggctgtgtgatatgaagaagttgtgaagctcttgttatattttcttctcttgcaaccattaaaaaataatttaaaactctaatatccatttccccacctgctttttgtttcattatagaataatagaaatacatttacaacatttctcttatacctatattcatttgcaagcaggtaaatacaggttattccttaatatccttttgtttaggaaactccacattcccattttgaaattattttatcactaatcctcaattaatcagtcagttgttttgagatgatttttctctgtcatcataaatatactatttctccaatattttcattttataccacatgattataattttaactcattctataaaataataaacacttcatagcatactaataaaataaaaagttagcagtttgtcatgatcttaattatttctttatctgtttctttcattccttctttaccaagacgagcaacattacgaatcgtattctctacacctttaacaacgattccatcaccgtctttgaattcttgaccatctaaatacatcttatatccaagaataccagcatccacactagctgcaatttttgccgcacaagaagattttgcaccatcacaaataattcctgaagttattgctagtgaatttacaattgtgtgagcaatgcattcataatcagcaccatataaataagcaattccacatccagctgcacatccggcactaacagccccacaataagcagataaacgaccaattccagttttttgatgaatcgtaatcaaatttcctagtactaaagcacggtataacttctcatcattaacatttagctcttttgcatattcaatgattggtaaagaaacggtcattccttgattgccgcttccagagttaataacaactggcaattcacaccctgacattcgtgcatcacttcctgcagcggcaaatgcctttgcacgagtaataatatcctgtcctgaatttaataaaacactaccaatattggcgccataattattagttaatccttcttttgcaatggcactattataagcaatttgtcttgaaataatctctttgacatcatttagatcaacaatattggcaaattccaaaatatccttaacgtttaggctacaacgatcaattaccatttcattattacaaattttattttctttagagaataaaactctatgatttttttcaattgatataatattagtgtgttgatcaacaattctgaccatggcataattatcatcatcaaataaagtaattttaatatctaagatatgctccgtttctaatggtcttactataatacaattatgctctaaataatcttttatttccttgatttgatcttttttacatcagcaattacttccaataccttgttcgcattgccagcaattatccctgctgctactgctgcttcaatcccttttaatccgtttgtattaggtacaattacactcttaacattttttataatattaccacttatttcaactagacagcgtgttggagtagttcctaaaatatcacgggccttactagcacaataagaaagagcaattggctctgtacaccccatcgccggtactaattcctcttttaagatttgtacatatgtctgatattttatttcatcaagtgccatttttatgcctccttctattgtaattataatcttatcgtctttttttactttttacaataaacgtttataaaaattactcgattttatagttgtatacatgtatttatacatgttacaatgtagaaaataattaaaaggagattaataattacaatgaacttaattatacctgaaaactacgatccagttttggatcttcgtcaaacccaggaagcaattaaatatattcgtgatactttccaaaaagagattggacgcgctctacatttatcaagaatatctgctccgctattcgttcaaaaaagtagtggtttaaatgataacttaaatggtttcgaatcacctgtctcatttactattaatgaaatacctggagaacaaattgaagtagttcattcactagctaaatggaaaagaatggcacttaaaaaatacggttttaaaatgcatgaaggtttatatacaaatatgaacgccattagaaaagatgaagaagttgataatttacattcttattacgtagatcaatgggattgggaaaaagtgatcgctaaagaagaacgtactgaagaaactttaaaacgtcatgttaaaaagatttttaaagtaatcaaacatatggaacatgaggtatggtataaatatccacatgctgtaaaccgccttcctgataaaattcatttctttacatctcaagaattagaagatcgttaccccgatttaactcctaacgaaagagaaacagcgatttgtaaagaattaggatgtgtttttgtaatgggcgtaggctgtaaattaaaaagtggaattaaacatgatggtcgggctcctgactatgatgattggaatttaaatggggatattttattctggtttgaaccattacaatgtgcattagaaatttcttcaatgggaattagagtcgatgaagatacacttgtaaaacaattagaagctgaaaattgtttagatcgtcttaaactcccttatcatagtcaaatcgttaacaaagaattaccatacacaattggtggtggaatcgggcaatcaagactatgtatgttattattgaaaaaagttcatgttggagaagttcaggcaagtatttggccacaagaaatgattgatgaatgtactaaacacaatattaatttactataaaaaacattggaagatactccaatgttttttaattatgacgataatagtcacataggtattcttttgcagcagctttaccaattgatttatctacatcatttccagttaaatatataattgcatcatgccattctttcatactataatcatcaacatttaaagacagaattgcagaatacaatacatctttaccaacataccttaaatcagaaataatcatacaatttgtaatatttcttaattgacctaataactcttctttttccacttctgtacccctcaatatcttattaaatatatattatttaccacataacacgtattatgtggtaaactactataaaaaataaacactgcaaaaacaaccttaaaaaattaaaaatttgaggttcttttaagtgtgaataaatttttaaaaatattaaaaaatatatattttagaaaaaaagaaaataattgtccgagattcccataaaaatgctgttaataatatttcaaattccttgttaaaattaacttaatgatgtaaaatgatattcagaagaatagttcttgttaatcaaataccacataatacgtgttatgtggtatttgatttttattttaattattttttcggttagaaaatactagatccatctgatcaaaatatcttttaaattcacgaccacttgacattgtataaatacgagtagtgtccatacttgaatgtcctaataaatctgctaaacgtgcaatatctttttttaaattatagtaagtaaccgcaaaaagatgacgtaaattatgaggataaactttactgcgctcaaccttagcatcatcacacaaatctttcatcgctttccaaatattactgcgatctaacggtcttccgcttctggttacaaatattgccccattttcaattttatttttatgacaatattttaataagattctttttagatcatcactaaaaaaaatttctcttacttttcctttattatatatttgcgcatacccatccttaagtgcttggactgtaatgtatcgatgttcgctaacacgtattccagttgagcaaattgcttgcagtaaaacatatagacgctcgtttttttgctttcgagcagcattaactaatcgtttatattcatcttttgatagttctttgctttcttctaaaaaaactcttttttgaatttttagttctttgattttacattctagccaaccattatattcaaaaaactgatttaatgctgcaagcatactatttatgctagtaggcttatatgatttcattaattcttctttatataatttaactaattccttggtaacttcctttttatccgcatattgataaaatttttcaatatcccgtatatatttagttattgttgctaaacttttttcttcatcaattagatgatttttgtaattaacgattaatttttgatttatttctcttttattcatctataataatctccttaatctcaataatctaatataaaataataacatatacatctcatattattaaataaatcatatatattattggattttttacgaaaaataaacaaacaaaaagaagaagtaatttatctttacatcttctttattcaaacatcttttttttacttatataccagtcaactacctctaatacaccatgttcctcattagaggaaattgtgtaatccgcaattttcttaattgcttcttttgcatttgccatggcaaaaccatatgtagcctgctcaagcatctctaaatcattaccactatccccaaatgccattgtttcggcatcactaattttccaacgttccattaacaggttaattccatgtgctttattaatcccagggataatcaaatcaattccaaaatgtccacaatcaactggtgtcataatatgtccgatcttctctttcaattctgttaaaatcgtttcaaaattatcttttgaacaatgcagatatatcttaaaaatagtatcatcaaaatcatcaaagttatctactttagcaagacgatgatagtaaaagttcattgtattataaaaatcttcatctatgtatttactaatataagcactttttcgaccacagacaattttttctacttcaggatattgattaactacctttaaaactgtctgaatatcctcttttgcaagttttgcaacaaaaacatcttttccttgatcaacgatataagctccgttttcagcaatgaaagctaactcgttatgaatatctggaaaaaaagatcttagttgataatattgattcccactagcaactacaaaatgaattcccttttccttcataaattcgtattgcctcgtaaatcgttcttgatcatattcattattatttgttaaaaaagttccatccatatctactgctattaattttacattcatatttacatcctttccatctttcgttataacgtgacgtatctttatataacttagtatatattgtttataaaaagattgtagattatttcataaaatgaaaaaatgactggaagccagtcattttctactatttatttaattcgattttagcaagttctttagctaaaccaatataagaagccggtgtcatatcaactaaagtttgacgatcttgatctgataagatatccagactttcagcaaattttagaatatcctctttagaaatacttttacctcttgttaaagcttttaaagtatcataagcatcaggtactccatactttcttaacattgtttgaattggttctgctaatacttcccatttttcatttaagtcactagctagtttgtctttattaactacacacttagccaacccattcatcgtttcattgatggcttgtaaagaatacccaaatgctaaacctaaatttctttgacttgaagagtctgataagtctctttgcattcttgacttaggaagtttattagataaagcaatacagatattattagacatatcaatattagcttcactgttttcaaagcgaataggatttactttatgtggcatagtactgcttccaacttcacctttaactggaatttgtttaaagtattccattgaaatatacagccacatatcaacatcaaaatcgactaatacattattgaaatgacgaataccatccaaaatatgacaagtataatcatgactttcaatttgagtagtcaatgggttaaatgttaaacctaagtactcttcaacaaatttttttgctaaaacttgccaatcttcattagggaaagccgttaaaatagcactatagttacctgttgcaccattgaacttagctttgattttaactgcttcaacattttcaatactagacaaaaaacgataagcataaactttaaattctttaccaattgttgttggtgttgcaggttgtccatgagtatgcgccaacatagcatcattactatgttcttcagcccatttatcaatgatagctgcaaattctttagcttttggtaaccatacatcttttaatccatattttagcatgcaagcatatgaagtattattaatatcttcagatgtacaaccaatgtgaacaaagctttgtaaatatccaaatcctaaagcatcaactttttcatcaataaaatactccactgctttaacatcatggcgtgttgtattttcaatttctttaattcgagcaaaagagtcgtaattaaactcacttgaaatagtagtaagtttatccatatcttgtaaatcaaatttagctaaaacgtcactttcaacattttcaattaagaactttagccattgaatctcaacgaaaactctatatttaactaatgcatattcagagaaatattctcctaaagcatctttaacacctgaatagcgaccatctaatggacacagggttagacattcaaattcttgtttttccattctattttccacctttaaaataatctacaccagcttcgaataatttttggtccatttcaccataaacatttttaaagcggttttcaccttgacgctcactatgtcccatcttaccaataacacgtccatctagagaaacaattccttcaatcgcatacattgaaccattagggttgtatggtgtttgcattgttaccttacgattaggatcaacatattgtgagaacacttgtccattttcaaacaattcttcaatcacttcctcaggagctacaaaacgcccttctccatgacttactggaattgtatgaatatcatcaacattgacatattttaaccatggtgatttaacacttccaatacgcgtatcaaccatctgagaaacatggcgaccaattgtattgaatgttaatgttggatcatctttagacatttcttgaattttaccatatggtaataatcctaatttaactaatgcttggaatccattacaaattccgatcattaaaccatcacgattatctaataaatccgtaattgctgcttttaaacgtggattcttcaatactgtggcaataaatttaccagaaccttcaggttcatcgccagcactaaaaccacctggtaacattacaatattagcttgtttaatggcaacttctaattcatcaattgaatctttaagcatttgttcagtcttatttctaattaaaactaattgaactttagctcccgctttttcaaaagcacgttttgaatcatattcgcagttagttcctgggaatactggaataacaactagaggtgtttctactgttacttttggtttaagatctgatcttgttttacaagctgccactttgattttactagtaggtgctttttctcttgttggatatactttttctagaggcgctttattaattgcataagcttcatctaatgaaattgtttcaccaccataagataataattcactatcattagtagttccaacaatacgataattatcaaagatacttaaatctttttcagatttaacctcaataataatattaccataatcacgcactatgtagctttcaagactattttcattattaaaagctactccaacaccattaccaaaagccattttactaacggcttcaataacaccaccatctttaacagtataagcactatagattttcttatctttcattaattccataatcgcatcgtattgtttttgaagatgattaaaatcaaatatatgatattgatctttattaataataatttcagctaaaacatgaccagtttctttaatttcaggtgtcatgatatcattaacatctccacttgtaatagcaaaagaaactagagttggtggtacatgtaaatcttcaaaagatcctgacatactgtcttttccaccaattgaagctaattttaacgcactttgaacacggtatgcccctaataaagcagccgttggttttccccaagtaattgggttgtctagaagtttctcaaagtattcttggaatgaaaatctaattgtatgataatttccacccatagccacaatcttcgctaccgattcaacaattgcatacattgctccgtgatatggtgaccattttgaaatcaatggattataaccataagtcataactgaagctgttgttgtctcttttcctaacactggaatcaatgctgccattccttcagtttcagtatgatatttaattccaccaaatggtgataatactgttccattaccaattgaagagtcaaatctttcaattaaccctttttgtgaagcaacacttaattttgataaagtttctttcacagtttcaacaaaactagtttgtgactgtttatcaaaaggtgtcttttcaaaatctggtaaagtgatcttaacatcttgataacgtttagcgcctgcagcatcaagaaaatcacgagaaatattaacaatatcttcacccatatgtttcattactaatctgttttgatcagtaaccactgcaacttgaactacttctaggttttctttagcacactcagctttaatgaaatccgcatctttttcatcaattacaatagccattcgttcttgtgattcagaaatagctaactctgttcctgttaacccttcatattttttcaagactgcatctaaatcgattactaatcctggagctaattcaccaacggcaacacaaacaccaccagctccaaagtcattacaacgaaccactttttcactaacttctttatttctaaataaacgttgaatttttctttcttcaaccgggtttcctttttgaacttcagccccagctgtttcaattgatttaacatcgtgagatttagaagaacctgtcgctcctccaataccatcacgtccagtacgaccaccaatcaataaaactatatgatcttttaaaggttctagacgttttacttgttcttttggtgccgctgcaacaactgctcctaattccattcttttagctacatatccgtcatcataaatttcatgaacataacctgtagttaacccaatttggttaccataagaagaaaaaccatgggcagattcttgacacaatttacgttgaggtaacttaccagccattgtttctgctaatgatttacgaggatctccagcccctgtaatccgcatactttgatatacataagcgcgaccagataacggatcccggattgctccacctaaacaagtagcagctccaccaaatggctcaatttcagttggatggttatgtgtttcatttttaaacattaataaccattgctcatcaccatcagttgtatgtaccgtaatctcaactgagcaggcattaatttcttcagatacttccaaatcatctaaataaccagttttacgtaactctttcattgagattgtggctaaatccatcaatgttaaaggtcgttttgtatcaataccataaactaaatgacgactagttttataatcctcaatatccttttctaagatctctttaaaagctccattttcaatatctaaatctgtaataactgttgcaaatgttgtatgccggcagtgatcagaccaataagtatctaatacttttaattcagcttcagtaggatctcttttttcttcatttttaaaataatcttgagttacttttaaatcttcatagttcatagccataccattgtcagttaagaacttttcaagaccggttttatctaattcattaaacccattaattgtaggcaccggtttaatttctggagcaacatcatttaaatcagctggtttttctaaactagcaagacgctgatcaacaggattaatcaagaagctttgaatcttcgtcaaaatttcatctttatcgcctttaaaagtaatggcaaatacccgtgcacatttaactttagcactactattccctgttaaaatagcaaagcattgttcacatgaatctgctctttgatcatattgaccaggtaaaaattcgattgcaaaaactacttcttgattattagtaggaaattcttcttgataaacatcgtcgaccattggttcagccaagatagtgttgattccttgttttaaaatgccatcactaactccttgaacatcataacggttgataattcttaaggtatcaatttctaaccctaattgttcaattaaattatgtttaatttcgtttgcttctgttgcatacgctgttcttttttcaacgtaaatacgctttacatcactcattttcatccccctatctaagtccgatatcacttcggtaatatttgccttcaaaatcaatcttttttgctaccgcataaactttttcacgaacctcatctaatgaaactcctgtagcacaaatatttaagacccgaccaccattagtaactaattttccatctttgattgctgtccccgcatggaaaacaacacagtcatcacagtcatcaatattctctatttcaattcctttttgataattacctggatatcctccacttgaaagaactaaacaagcaacgtgttgattattccatttaacttcaacatcttttaaagtttttgtagcacaaccaaccatgatatcatatagatcactatctaagcgaagcataattgattgtgtttcaggatcaccaaaacgaacattaaattctaatactttcgctttaccatcttcaatcattaaaccaataaacacaacaccgcgatagtccatattatcatcttttaatccttgcataaaaggatcaagaatatctcttttaattacctcatccataccttctggcataaatggatttggtgaaacagttcccataccaccagtattaggacccttattcccatcaaaaatttgtttatgatctttagcacttaccattggaacaattgtttctccatctgtaaaacaaagaagtgaacattcaaatccggttaaaaattcttctaaaacaactttacttcctgctccatcaagacttccgtcaatcatcatttcttttaaagttacagtagcatcttcatggttgtcaacaataacgactccttttcctgctgctaaaccatcagccttaataactaacggataatcaaattcgctaattgctttaacggcttcatcataactattaacttctttatatttagcagttggaatactgtgtctaatcataaagtcttttgaaaaagctttactaccttccaatgtagctgcatgtttagttggtccaaaagccattaacccggctgcctctaaatcatttgctagaccattacaaagtggtacctctggtcctataacagttaaatcaatttgatgttctttagcaaaattaacgatcatttcattatcttcaaccttaccatcaatacactcaccaattttagcaattcccggattccctggaatcgcatagattttatctaccttactgctttgattcaatttatacgcaatggcgtgttcacgaccaccactaccaattacaagtactttcatatattctaggcctttctattaatgtctaaaatgtctgtatccagtaaataccattgggatacctttctcattacagaaatcaattgaatcttgatctcgaaccgatccccctggttggacgattgctccaattccagctttatatgctacctcagcacaatcgctaaatgggaaaaaggcatcactagcaagaactgcacctttaaaatctttatctttattattgataatcgcattttctaaagcccagattcttgatgtttgtccaccaccaacagccaatgtaacaccatctttaacgatacaaatagcatttgactttacaaatttaacgacccgcataccaaattccatatctttaagttgagcttctgtaggtttggctgttgttacacaattcatttctttaatcatttcagtattgatatcttgaactaaaactttaccctctaaatatttaatatcatatttagcttcacgcgcatatagatttttaagttttaagattcgtaaatttttctttttcttcaatacttctaaagcatcatcatcaaagtcaggtgcagctacgatttctaagaagatcttatgcatttcttcagccgtttttttatcgattttataatttactgctacaattccgccaaaaatactttgaggatcagcctcataagctttcatataagaatcataaccatctttgccaatcgctaccccacaaggagttgaatgtttaatcgcagctgtaacaatttgatctttaaattcacgtactacggcaatagcaccatataaatcattaacattgttgaaagaaatttctttaccgtgtaattgttcataatccaataaagtttcttgcacaaatggatcaacatagccgttagctctttgttgagaattttcaccataacgcaaatgttccgttttctttaaggaaatgtttaaagtatctgggaaatcatcccctacaacacctgcaaaataacgagaaatcatcgcatcataagcgccagtagttgaaaatgctttatatgcaagatttaatctaaaatcaaaatcatcagttttatctttgattgcagttaagacgttatcataatcagcaggatcggtaacgattaaaacatctttaaaattctttgctgctgaacgaatcatcgatggtcccccaatatcgatattttcaatcatatcttccatcggtttaccagcttttaacgctttttcaaattcatataaattaacacaaaccacatcaattggttggatgtccatttttttaactgtgtcaacgtgttcttgaagatcacgacggaataataatccaccatgaacttttggatgtaaagttttaactcgaccatctaagatttcaggaaattcggttacatcatcaattgcaatacatggtacattttctgcttgtaatttagccatcgttcccccagtggaaacaatttcaaaacctaaatctactaggcctttacaaaaatcaacgataccatctttattagtaacactaactaatgctcttttcattttaaatcaccttagccctttcattttcaacaataattttaccatcacaaaataaagcaactgctttaggtaaaatgcgatgttcaatttctaatacccgtgcttggatatcttcagcattatctaaatcatcaatattgcacgcctcttgaagaataatcggtcctccgtcaacctcactactaacaaaatgaactgttgcaccagtcacttttacccctcgcgctaaaactttttcatgaacatgcattccataatgccctggtccacaaaatgatggaatcaatgaaggatgaatattaataattttattaggataagcatcaatcaatacatccgtaaggatcgctaaatatcccgctaaaacaactagaccaacattgcgttcttttaacattttaacaattaattcatcatctttacgcactacagcagtttcaattcctgcctgtcttgcacgttcaagtccatatgcattcttacgattagaaataacgattgcaatttcaccattgatgctgttatttttaacagcatcaatgaccgattgcaagtctgttcctcccccagaaacaaagacagcaatttttagcataattgcactcctttgtcacctgcttcaatacttccaataatataacattcatcacctgctgctttaattgccgccatactagtttcaatatcagctggatctaacgcaatgaccatacctaatcccatgttaaatgtgttatacatcatttcctctgcaatatcaccttttttagcaatcagatcaaaaattgcgggtactttatagctatcttttttaataactgcttttactccatcgggtaacattcttgggatattttcatcaaaaccaccaccagttatatgagagcagccttttattcttaccccagcatctttaacattttttaatgcttttacataaattctagttggtgcaattagggcttcgcctaatgtttttccaagttcatcataatatgtatctaaggtttctttattcatctcaaatacgtttcgaactaatgagaatccattactatgaactccacttgaagcaattcccactaaaacatcacctggtttaatgttttcaccattaataatatcttttttatcaaccaccccgactgcaaaaccagctagatcatagtcgtcttcaggcattaatccaggatgttccgctgtttcaccaccaactaaagcacaaccagattgtttacagccttcagcaaccccacttacgatcgtcgcaattttttccggatagttttttccacacgcaatataatcaaggaagaacaatggttctccacctgaacaggcaatatcattaacacacattgcaactgcatcaataccaattgtatcatgtttatccattacaaaagcaagttttacttttgttccgcatccatcagttcctgataaaagaacaggttcatccatatctttgattgcacttaaatcaaatgctcctgcaaaaccaccaagaccacctaaaacctccggacgcattgtttccttaacgtgttttttcattaattcaactgatttgtatcctgcttcaatatctactccagcctttttgtaatccattttttaatctcctttattatttttgcattcttgctaatactgctttataagtttcgattaaatcaccaatatcttgtctaaatacatctttatcgtatttttgattagtttcaacatcccataaacgacaagaatctggagaaatttcatcagctaacaagatttgaccatcaggtgttttcccaaattcaattttaaaatcaactaattttaaatttaagcttaagaaaaattcctttaataattcatttatttttaatgtttcttgtttaataaaattatattcttctcttgtacatagttttaaggcaactgcgtgatcttcattaatcaatggatcaccataatcatcatttttataacttaattcaaaaattggttcgtctaaaacgattccttcaagagctcctaatcttttacaaaaagaccctgttgtaatatttctaataattacttctaatgggaagatatcaactttttttactaaaatatctcgttcatttaatttcttgatcatatgagttttaattcctgcttcttctaacatatcaaagataatgcaagaaattgtattgtttaaaactcccttaccttcaaactgatcatgttttacaccatttccagcagttgcgtcatctttataatgaatcaaatattcatcttctttatctgttttgtaaacttgttttgcttttccttcatataataattctgccattttgatttctcctcttatcttttatttatattttgcaataacttcttcattagcactcattgcttgcttttccatatctttacgatatgctaataacttttctttaatcttatcatgtttgattgccatgatttgtaacgccaaatatgcagcgttcttgctcccgttaattgccacagtagccacaggaattcctgaaggcatttgaacgattgatagtaacgcatccataccatctaatgtagccccgctaattggtaccccgataactggcaatactgtttgagaagcgacaactccaggtaaagctgctgccattccagccgctgtaataattacttcggttccatcagtttctgtttctttaataaatgtacttaatcctaaatgtgcccgatgagctgaaagacatcttacatttacttcaacaccatagtctttcaaaattccaattgctggttcaaccttacttaaatcgcttgtagaacccataataattgctactttcataatttcttcctttctttttaaaccactaaaagtgacaatgagtcacttttagaataagcctactatcttaccatctttatcaatgtccatattaaccgctgccggacgttttggtaatcctggcattctcataatacttccagagatagctactaaaaatcctgctccagcagatgggataagatcattaatcttaatcgtaaatcccctagggcgaccaagcagcgtcggttgatcagataaagagtattgggtcttagctacacagattggtaaatcagctaatccttgtgcttcgtactttttcatctttgttaatacttttttatcaaacgctactccgtcagcaccatagatttctttcgcgatagtttcaattttttctttgattgataaatttaaatcatataatggttgataattagcttctttagtatctaagatttctaatagtttttcagcaagctcgattcccccatcagcacctttttcccatactttagaaatagctacatcaacacccattttattacatgtatcttttaataattgcaactctgcttcactatcagttggaaaagcattgattgctaccactgaaggcaggttatatttcgcaatattttcaatatgtttttctaaatttttaattccttttgctaaagcttcaagattttctgtgcctaactcttttttatcaacaccaccatgcatttttagcgctctaacagttgcaacgatcacaactgcttgaggatcaagattagcttgacgacattttatatctaagaatttttctgctcctaaatcagcaccaaatcctgcttctgtaattgcataatcacctaatttaatagctaatttagttgccatcactgagttacatccatgagcaatattagcaaacggtcccccatgaacaaagaccggcgtatgatctaatgtttgtactaagtttggtttaattgcgtcttttaataataaagtaactgcaccagttgcttcaatatcatttactgtaactggatttccagcatagtcataagcaacgatcattttacctgctcgttcttttaaatcttcaaggctcgttgccaaacataaaattgccattacttcactagcgacagtaatatcaaaaccgtcttctcgaggcattccattgacttttccgccaagaccacagatagtattacgtaaagcgcgatcatttaaatcaacaactcttctccaaacaatattacgtacatcgatatttagaggatttccctgatgaatagagttatcaagcattgccgcaataagattattagcagcagtgattgcatggatatcaccagtaaaatgtaaattaatatcttccattggaactacttgtgcatatcctccaccggcagctccacctttgatcccaaaacatggccctaaagatggttctctcattgccacaactgatttttttcctaacttatttaaggcttgagacaatccgatcatcgttgtcgtcttaccttccccagctggagtaggattaattgcagtaaccaagatcaattttccatcaggattgttttccagccgattaatcgcctcaagtgcaatcttggctttatacttaccatatgattctaaatcatcatcttctaaaccaacctttttagcaatctcactaattggtttcatctttgcactttgtgcaatttcaacatcagttaacataacgccaccctttcaaatataatttttaaataaacattctaaggtcaccaataatcaaaacaaaaatacacctaatttatatcatatttcggcttttttctcaaccagtacagttgttttaaaaccactcttttcgccctcaaaacaagcaatttgaccaaagaattaaaaaagagcctacactcgtccagactcttgcccagacggtcggctcttacatgattatactccctgtggttaattccacttccgtcagtcgtataactatttgcataatatcatttattgattcaagattcaagcatttacaaaaaaattgtcgcattttaaactcaacaaaaataattgataataaaaataattactaacggaattatcattataaacaactctttgattaaaatagcatcatcacggctttctaacttatctttgatggtctgttctgtatcaatttgacgagttggataaccaacaaaaccaccacaacaaaaagctaaaacaccaataaaaataaataaacagataatatttaaagtacctttactgatactattagcaaaacggcttcccaataagccaaccaagaaaacaatataaccactataaagaaaatatactaatttgcgcttcataattatcaccttctatgttaattataaagataatataatgagattacaaatattatatatattattttataataaaagatggttttatcccatcttctagtaactatatttttgtattttagttagtactctctctttttcattaccttctaaaattattggctgataattatttcgtcctttaaccgaggtaactgaacaaggaataatttcgtgactatctccagtataaacaccatcagtgaaattcattgtaattgagtaaatcattgaatctgtatcactaggattgcgatttccaccaaaacaaaagtttcctaatgaataaacgatttgttttccattatattcttctgttccttgaacaacatgcggatgtgaacccataactaaatccgcaccactatctattgaaaattttgctaactcacgctgatcactattcgcatagtattcccgctcaattccccagtgataaaaaacgactacggcattagctccctggttatttttcaagtcattgattgctgctttaattgttgcacgccctttttcgttattcattgataaagacattgaacgataccccaaaaagccaattttaattcctttaatttccttgacacatgacgtttcatagccaaaatagccaattcccttttcatcaagtacttgcttagtatccgtcatcccttgttcataataatcttctgaatgattattggcaatagagaccagctcaacactaccgctagttaaaatattaacatattcttttggtccgctaaaaggaaactgtttttctacatgtgaagtcgcacttgtcaatgggccttcaagattaacaattgtaaggtcatcattttcgaaaacatttttgacattcttaaaaaaatatgtagcatcatttccctgtttggcatactcttgattaaacgatccatcataagcttgtcctgcataatttcccaatgtacaatcccctgcaaaatttaatttaatactagtattgacaggctctttttcttctgttttttcttctttcttgactgtttcttcttttttattcttttgattcgatgatgagcagccaaccactaaaagtaacatcatcaaacaaattaatattttcttcatctttgctgcactcctttgtccattagtatatcatataattagattcttttacattagataaaactttgttataatacatcttgggaagtgaaaacaatgataaaagaaataaacaataaaatggattatgatcaccttttaactgaaagtgatcctaatattaatttagttagagattacctagaaaatggcgctctgtatggcttttatttaaaagacgaaccagtttcattcattgcagtagaaataattgatggcgaagttgaaatcaaaaatctccttacattaagtgaacatcgtggtcacggctatgccaaagcattaatcaaatttattgaagaaacgtacaattcatatgatacttttctagttggtactgcaaattccagtcttgaaaatatcactttttatacacgtttaggatatgtttatagtcatcggattgaaaatttctttattgactattatcctaataagataattgaaaacggaatgcaggcaaccgatttaatgtattttaaaaaaagtcgacaaggcttaaattaagagcaaagacatatttgatataattatctttaaatagccaaggcaaataaccaaaatctatttaagagggaatcatatcatctaaacactttgcttttttatttattatgatgtttttaaatcagtatctatgttagaatattaatataaggctggtgagaaagatgattgaacttcctgaagcatatgcaattgctgatgacttggaaaaagaaatacttggtaagactataattgatcttgggggtaactacactgatcataaatttactttttatgaaggaaatcctaattcatacaaggaattattagttggtaaaaaagtaacaggtattattaagcgaaattactatgttgaaatagtaattgagaattaccgtttaacctttcgtgacggcgctaatattcgctactaccaaaaaccaactaaattaaaaaaaagcaaattactaattacttttgctgatcaaagtttcatcaatgtgacaacatcaatgtattgttttattggactttttgatcaaataacaggatcaaataatgaatattatcaaacagaattaaccagtattggtcctttagatcaagaatttactcttaattactttaaaacattaattactgatgaaactgaaaaactcagtatcaaagcctttttagcaactaagcaaagaattttagggattggtaatggtgttgctcaagatattatgtttaatgccaaactctttcccaaacgaaggattaagacattaaatgaacaagatataaaaaatttatatgatgcgattattagaactctaacaaagatggtcgaaaaccacggtcgagacagtgaaaaagatatatacggaaatcctggtggctacaaaactatcttatgcgctaaatcttataaaagtggttgcccaatctgtcactgtgaaataaaaaaagaacaatatctaggtggtagtatctattattgtcctaattgtcaaaaataaaaaagtaagatagaaattaatccaagggctgtcaggtagatacacaaaacaaataaaatttttaacccggctaacttagtgatatgctcccacctccatagatacccatttggttatttcgtgtgtctactttagtggaatcatcatatcatgttttcatttacttttttatctttctgtttaaatcaaaataaaaacctgtttattttcaatcagttatagcattcatctaatcatttgaacttaaatcttttatcttccataaaggattttcgtgaaggatttccttcaactcgaaaaatccttttatttttcacatcatatatgaccgaccaaactgtatcctttcctgtttttcgatcgtactgacaaatataaccatacctacctgataataaagcagccgcatcattaaaatcgttgattttatcagttaaaatcgcttctttgatagtttgatagcgcttttgagcttgccaattatcaataagatgattattatattcccgcattgcttcactgaagaaccagttagttgcaaaagcattctgattatttctattgattttaatttgtttactattgcactcaatcaatgcaatatcaccaccagtatcaaccagtgtaaaagtttgacttgaagcaatcggtaatgtattcaacaattgaattacttcatcaactgttttacacttctccaaaaatagccgcagcatcattccggcatttagccccagttgttttacagtcggataaacagcagttaatccaattgctaaaccatactcgttgataccatcttccatctcaacgcacgctgtagtgttgccattaaacgcatatgaatcattagtaaattgatatatacaattagtatacagtttttcaatttttgttaaaaaatcactatttcgtccaaataagatttcattttcatttctaaaagcaaaacaagaacaatgtacttctggaacaatgcagtacatactcaacaaaacagcacaaatacttttaaatgaacatttttgtccatcagcaattccccttatttcttcaataatctctgggaaaaatttttgataaatcggtaaacattgtaaagcaaaatcatagtgctctaaagtaatttcaaagggtacattagttaaaaacagttgcttatgttttaataaatttctcccccacttaaatccaatctgataatgttctcctttaaatcttgaatgatacataatttttcgctcctttttataagagccaccggtaactcataatccaagcataaatcaataaaattttattgtcaatgaattaaatttattaaatcaattacccgttttacttattaaaaatcatgaaattatctatttaaaggcaaatataatccctcctatgataaaaagagatagcggagcaattaaaaactaaaatcaaaataactaacgtacatttaggaaaactactatttattaaagactttaatataaataatttatttcctcttctccccttttcagtattatttatataagtatgaagcttatcaatctgttgagaaatttcgctacctcaagggttatccaagccatatttttttgctatttagacatattattatcaaaatatttttcaagctcagacaaattttgatattgggtaaaaataccgttcaaattgagcggatcttcgattatgatatccttatcttttaaaatagcaaagatttcatgaatattatctagagaaatactctcaaataaatgacaactatattcagcatatatatccaaatctatataaataccgtgataataatccaatatgtgaccacattgcaaatagcaaatacccatgatcgccagctaacgccggaatataagttctggaacatatcgaaaaaaccactcttttgatatcctgataattatatttgacaatcctttcttatgttctccctaatcattatttcttcatttgagaaaagaacgtgtactttattttcaatgtctactggaatttttaaataacctaaaaagctttcttgcgtgataagtttttttcaattaaatcaatgattctctgctttttacctatctcttttaataaatattcttttttctgattcaaacatgtatttaaagaaatttcattgttaaatatacgtctgatgtctttaattgaaagatcaaaagagcgcaacataataatattttttattattcgaatatcttcataactataattacgataaccattatcatcacgtgatggcgaaattaattcctccttttcataataacgtaaggtatcctttgtagtccccaataatttttcaagttcatttgttttcataacaacctctccctgttataaaatataaaaatcttaaaaaaccaagaaaacgtaagaagccttcttgcatcttacgttcaattacttgtttaaaaactttttaattccttcaaatacttcatcacttataatatgttcaatcttacaagcatcatcctcagctacttctttagaaacctttgcagtatgcattaaaaattctgtaagacattcatgtttttcataaacagcagtagccttttccgttcctttttcagttagttcaatatatcctttactatcaacaataatatatccgtcattctttagaatgcctacaccacgactaacacttggtttactaaatcccaactctcgagcaatatcaattgaacggacattaccgttttgtttttttaataataaaattgtttccaaatacatttcaccagattcgtgcatcatctactcttcctccaatcgttttatataattataccaataaaataaaaaaaagaaaaccggaatgcttccggttttgaaagttacgaacttaatgtaaagaatgataattataatggctaaattatttatcacttacttggatgtggatttaaagttcgttacatttgaaaatattatttataacttgaaggatattttataaattacattttctatcactttctaatatgccatgatttcaaggacaaaataccatggacgaatgtttagagaatgaactgatataaaggaaattcactactatgtttaaggaatttggaaaatagttaaatctattattgttttcgacgggataatttagtaagaagtatccgtctatgtcttcgagaaaaaggtgaatagcttatcacggatacctttcttactattttttacttttaaagagtgctaataattatattaggaaattttatcgttgtaggtatgatatatcagcaacctctatcagcaaatatttaactattgattattaattatttttttaatttcctctatatcttcatcagttccatcattctcaactttgtaaagacaaggaacattgtattgttcagcaataacgtcaccagctttacagaatgcttcaccgtatccttgatcaccactaactataacaccttttaaatggtcaccattactatttaaaaatgattcaacttccatagggacatcaccataaccatcagtataagtgattaagagaaacggctcgctaacagcctcatctccagaagatatttctaaggcgtcgacacttaaacgatcaacaatactttgaacattacctgttcttgatgcaaatactactttcatacatttctccttttctctagttagcttaaactaactatctatatgttagcacagactaactgactatgcaatagtttttataaaatttatccaaattatttattcaattggtaaaatcctgataatccagaatatttactttgtttacctagacgatcttcaattctaattaattgattatatttagcaattcggtctgttcttgatgcagagccagttttaatttgtcccgcatttgttgctaccgcaatatcagcaatagttgtatcttctgtttctcctgatctatgagagataactgctgtataatttgctttttgggccatttcaatagcttctaaagtttctgttaaagtaccaatttgatttactttaattaagattgaattagctacaccgcgtttaattccttcttcaagacgtttagtattagttacaaagaaatcatcaccgactaactgtactttgtcccctaacttctcagttagataatcccaaccttcccaatcatcttgatctaaaccatcttcaattgagataattggatatttagaacataattcagcataaaaatcaactaattcttttgaagtaaatgatttattattttctcctggtaatacatatttaccatcttggtaaaactcactgcttgcaacatccattgccaatttaatatcttcacctggtttatagccagccttttctactgcctctagaatagttttaatagcatcttcattagaagctaaatttggagcaaagcctccctcatcaccaactgctgtatttaatccttttccttttaaaacggctttcaaagcatggaatacttccgcacccatcctgattgcttctttaaatgttggagcgctaaccggcataatcataaattcctgaaaatctacattattatctgcatgagctccaccattaatgatattcatcattggtgtaggtaatacataagcattagctcctccaatataacgatataatggtaaatctaagctcgtcgcagcacatttagcaatagctaaagatacacctaagattgcatttgcacctaacttacctttatttggtgttccgtccaaagcaatcatcgtttcatcgatttctctttgatttgttacttctttaccaattaattctttagcaataatctcattaacattttttactgctttttctgttcctaatcctaaataacggtttttatcaccatcacgtaattcaactgcctcatgaacacctgttgaagctccacttggtactatcgcactagcgaatgctccacattctgtagttacttctacctctacagtaggattaccacgtgaatccaagacctcacgggcatatacacttttaattttactcatttgttttcctccttcatgattccttaacctgggtgactaagccaggttagaaagaatcatttattcacacgaagttagttttacctaactacaataaggttagcacatactaaccttatgtgcaagtaaaaagcattaaaaaaatcacagaaatttctgcgattacaaatcttttgttaactcattatcccaatccagatcattataacaagcccatagaccattaagtgataattgaaccatactgctaacagctgcatcagtataaaaagctaaatgttgtgtcatgacaacattaggaaattgacgtaaatatgccatatttttatttttaattatatcagtacgcatatcttgatgataaattccttcttcaccttcaaccacatcaagtcctaaagccccaatcttcttattttcgattcccctgattaaagactcggtattgcataattgcccccgagcacagttaataatgattattccatctttcattttacttattgtttgatcgttaattagatggtgcgtacttttaagatacggcatatgcaaagaaataatgtcacattcttgataaaactgctctaggtcgacataagttgcatatattttagcggtttcattttgatgaatatcataagctaataaacgagctccaaagccggataagttttttaaaactgcttgacctattcgtccggtccccataattcctatcgttaaatctttcatctctcgcccttctagcccttgtaaagaataatcatttacctgtcctaaccacaaagcttttttataatgacgtaacgataacagcattagcataacagtaaaatctgcaactccttccggtccataactagaattacaaacctttattcctaattctttggcatattcgatatcaatatgatcatatcctattgttcttgttgcaataactccaattcctgctttagcaatagcatctaaaatttcatgattgatcttactctcccctaaaaaagcaattccatcatatccattcaataaagataaatttttttggcatagatattccttataataagttatttcaaagttatttgaattattcataatttcaaaatctgccatctcgtcacttcgtacttcaaatgcaataatcttcattctcgtcctcctcaatatcaatattatatcatctcaaaatgaattctaaacattttgttgaatttcatacactgaagttctatcctacattatctcttttaaaagcaagattgtgttttctaccatatcattagttgcctaatcgcaacactctaccaatttctttgaattaatcaattcatcacattctgtatcaataataatgattctacctttcacctttataaaaattatccttattaatagcatgatatgttttagcgctgactggaatatgtaaagaaataaagtccgcaattgaactaactgaataaggattatttgaaataccaattcctaataccttggtagccttaatattaatatgatcatacccaattgaatggatattaatgaatttaacaccattcctttttaataagattaataattcatgattcaagattgaattttcgacaatgctaattgcttcaaaaattgctattataaataattttctttagtcaaaggttctttgagtagtttaatttctcccccatatttcaataaaaatcatcttagtgttatccctatatatctttacgatgattaaacatgggtattttcatactcatagcctgttcaatatgtttttattagtgtaataatattatattaaaaggtattcataaactcctttttttaccgattattttgtcgaatttattttgataatcgttgatgtttcattgactttaactcggctttattctatactttactcaggtgattttagttcgccttaaatagcatgactagctatttataatcgaaaacacgaagggagttagaaaaaatgatttattcacacgaagtagaacaaatgtgtagtgtcgctcaaggtgcttcacatggatgtgctccaattcctgaagaaggaaaatgggtatattctaaagaaattaaagatatctctggtttaactcatggtatcggttggtgtgctcctcaacaaggtgcttgtaaattaacattaaacgttaaagaaggtatcattgaagaagcattaattgaaactatcggatgttcagggatgactcactctgcagcgatggcttcagaagcattagtaggaaaaactttattagaaggtttaaatactgacttagtttgcgatgcaatcaatactgcaatgagagaattattcttacaaatcgtttatggacgtactcaatctgcattctctgaaggtggtttacctgttggagctggattagaagacttaggaaaaggtttaagaagtatgactggtacttcttattcaacaaaagctaaaggtcctcgttatcttgaattaactgaaggttatattaatagaatcgctttagatgctaataatgaaattattggttatgaatttgttaacttaggtagaatgatggatatggttaaagctggaaaagatgctaatgaagcaatgaaagaagctactggaacttatggtagattcgatgatgctgctaagtacatcgatccaagaaaggaataataggagggtacgaaaatggcattatttgaaagttatgaaagaagaattgatcaaattaacgctgcactagctaaatttgatatcaaatcaatcgaagaagctaaagctatctgcgatgaaaaaggaattgatgtttacgaaatcgtaaaatcaactcaaccaatctgttttgaaaatgcttgttgggcatacactgtcggtgctgcaatggcaatcaaaaatggagatgttaaagctgtagacgctgcaaaaacaatcggtgttggtttacaatcattctgtattccaggatcagttgctgatgaccgtaaagtaggtttaggacatggtaacttaggttctatgttattagatgaaggtactgaatgttttgctttcttagctggacatgaatctttcgctgctgctgaaggtgcaatcaaaatcgctgaaaaagctaataaagttagaactaaaccattaagagttatcttaaacggtttaggaaaagatgctgcaaaaatcatctcaagaattaacggattcacttacgtggaaactcaattcgattattttacaggtgaagtaaaagtattatctacaacagcttactctgatggtcctcgtgctaaagttaactgctatggtgctgatgacgttagagaaggtgttgctatcatgcataaagaaggtgtagatgtatcaattactggtaactctactaaccctactcgtttccaacatccagttgctggaacatataaaaaagaatgtattgaacaaggtaaaaaatatttctcagttgcttctggaggaggaactggacgtactttacaccctgataatatggctgctggtcctgcttcttacggtatgactgatactatgggacgtatgcattcagatgctcaattcgctggttcttcatcagttcctgctcacgtagaaatgatgggattaatcggtatgggtaacaaccctatggttggagctacagttgctgttgccgtagctatcgaggaagcttgtaaataattacacatttatattaaattctttaaaaagtcctgattaattcaggacttttttgttttttcaacaatattatatttaacaatatatctatataataggttatacattgatttaattctagattttgttgcattacctacattagctttttcaatcaccccttctgtatgattaggtctaatatccttaaatctcatattgtgcaatggttctgaatgattaaatgctgctaaggcttcattttttattgaatagtgaccaagtattactcctctaaaccttacatcatttttcagcttttacgcatcgcccctttaatttgtaaatattcctatatccgtttggtaattttatgatttcttcaataacaagtttcactaagtcattaatcattatgcttcaaataatatctaatttaatatttttatttgcaacaaaaaaagtagatcaatcaatatcctctatcttgaagatcaaccatctactttagttttataaatatcttattttcttgtaactacttttacatagtttaaatacctcttcagacacttctatgtcttggtttttcaacttacaataatacttcttctcgcttttaaatcaagacttactcatctatgttaagaatatgaagtttataaatgtaaaatgctaaaatatattctatttcgtgtttggcaaaagacctactatagaatgtggtttataatcttcttctagatacctgcagtcttcatcactcaattctaattctaccgctttaactgcatcctcaaagtgaggtattgatgtagctcctacaatcggtgaagcaacacctctctttaataaccaagccaaagatatttgagccattgacacattatatttttcagcaagttcacttacacgatcaataatgatcgtgtcattatctattgcatgatcatacttatcacggcgaactttatcggtttttgctctcaaagaatcactatcccaacctctatgtgttaaatggccaccagccaaaggactatatggcactaaagaaacagcatattgttgacaaatcggaatcatctcatgttcatcttcacgatacaacaaattataatgattttgcattactgaaaatagtgtccaattattattcttcgctacttcctgcatattatggaattgatatccatacattgaactcgctcctaatgctcttactttaccacttttgactagagtatctaaagcctccatcgtttcttcaatcggtgtatcataatcaaatcgatgaatataatacaagtctaaataattagtctgaagtctttctaatgttttctctatctctctaaaaatcgcttctttactaagtttaccttcattaaaatagacttttgaagcaataattactttttctctaggaattcctagttcttttaaagcattaccaataaagatttcacttgtaccatgagaatatgtatttgctgtatcaatgaaattcacccctaattcataggcatgtttaatcatagacgttgtcttttcttgatccaatgtccataaatggaaatcttctgaaggttctccaaaagacatcccacccacacaaattctagatacttcaatatcagtgtttcctaattttatatatttcactcttttttcctcctcaatattttataaaaatatcttattgtaaaaatattttttaaattcttctttatgcatactcatatattgattataaagcttttcacatacagaatctgtaggataatctatttgatcttttccatcattaacagccttccatattaccttggcagcttcactaggttctgggaattcttcatttccacttaataaatactctctttgtttggcagcaggcacttcatatccagttaaatcattgagtggtgtttgaaaattagtttttgtaccacctggaatcatcgacttcacactaataccaaatggttttaattcataatataaagactccatcattccttgttgagctcgttttgctgctccataaacaccatcacgaggtaatgcaataatcccagctagagatgtcgtcgttaaaatcattccagctttcttttccttaaaatgaggaataaattgttgtgttactaacattgtccctataacatctgtatcaaatagttttttaatatcttcttctggaattctttcaaaagcagccattattccataccctgcattattaaataatacatcaacatcatattccttaattgccttggaacaagtctcttttatttgaatagaatttgttaaatctagtggcataataacaacattttcaagacctaataactctcctgctttatttaaattcctcatcgttgcgataactcgccatccattttgagcaaaatactttgctgtttctttgccaattcctgatgaagcaccagtaataaaaattgttttcattattttattctccttattttaaattaatttacctaattcatatgcttcttgtatatctttctttttctttacctcccctttatcataaacacctattgcataaatatgacctttcaatatgggattattcaaacatcttaaaaatctataaacttattctttacatagttcattgcatttaaagaactatctatactcgtcataatataataaaatcttttattattaaatatctaatgaaaatatcaaatacaatcaataaagattatatccacagtatctttctgctaagagtttaatttaacggcatttgaaaaacattgttccgttatgtaatgtataattttacatatttttattttcttttatattaaacaacttgataattcatccattttccttttatataatgataagtatatataattgccttaacaatccaatcgagaaacattgcataccaggttcccatcattcccatgttaaaaataacagctaaaatataagaaaatagtatacgacagataaccattgatattattgatacaatcatcggaaattttgcatcaccgctacttctaaaaataactggaagcatatagccataaggccatattaatgtcatcataattccatgaagtataataatttgccaaacatatgatgttgcacgacttgataagttataaaaggacataatcagtggcattaataacagaataataactgtactaataataaaacttatatgcatccatctatttatttttttagtatagtatttagcttgatcataatcatttgctccaatacaacgagaaataatacttgttaaaccaagatttattgcagtacctggcagtacttgaaacatgactaatgttccgcctactgaatttgctgcaatactcgcagtaccaaacaatgatacaatactcaaaacaattaaccttcctaaataaaacatactgttttcaattccaaaaggaataccaatatttagaattttttcaatcatatttctatttatttttatattcattaattgagataaatgaattgttgtctttttagagaaatataatataagtagtgccgctcccactcgtgaaactaatgtcggaatagcgattccttcaacacccattttcaaaatgaaaacacatagtgcatttcctataacattaacaatattcatcgccaacatgatttgcattggtagttttgaattgttcattgttcgaaatattgctgctccaccattgtaaatggctagaaatggtattgataatacaacaacatttaaatatgtcatcgcatgatgatagacatcactactaatggaaccaaataataaatgtaatattgagtttttaaatacaaaaattattaaagtgattactatagataaataaaatgtcactttcatcatttgtaaggctgattgattagcctcattatcctttttactacctaaatattgtcccgtaatggctccaccacctgtagctaaagctgtaaaaatacttatcaataaagccattacaaagtccacaagagaaacaccagatactgctgcttcacctactttagcaaccattaatgaatcagcaaagccaactagatactcaagaccctgttcaataaccaatggtataaataaatagagcaagtttttattagaatataatttttctttcatcttcatcccccctatgcaataaaaataacaaccatagtatatacaaataatgtaacaatcataaaaatagaaacaaaagcacttgtaaatgaagcatcgtcttcatcttgatacaacggttcaataataggcattaatccaaatccagtcgggcacataaagtaaataataggtgccatcataaaggacttatctgccattaactctggaaataatacaaagaatccaagtataacaaatgcataatagacaaacttaacagcaattaatcgcaaaacaggttttaaattatgactatcaatatttaaatcatatcctaaaataaataaaatcattggaataattggtgctgtcacttgatttattgttgttgaaatcatatcaccaaacgatgatgctaataataattcatataaaccagtaaaattcataaataatcctaaaataaccgcaataacgaaagtattagtaaagatactttttataatatctttataagatgaaccggctgatacttccttggcaattaatattggaatcgttataaaacaaatcataatcccacccaaatcaaaaatcactgtagtacttgattgaccaacaatagataaatataaaggtagggcaacattcccgccctcaacaaccgttagcaaataaggagcaaatttttgatattttttagtgatatgctgtgttataaatttacctataaccaaaatcactaaataagctatatatacatataaaataatcgatatatgactcaattcaatgttcgcatttgccattaaattaaaaacaagaaccggaaaaagaattttaaagataatgctatttgcaccatttttttgatttaccgttacccatccctttatatgcgatactaatcctagtaataacataaagaaaacaggaaacaaagtcgttaaaactgtcataaacaatcactccttatcattttatttcgattataatatattatagaattattcataagtaaaatacattttttatcataacatcattatgttttagttatgtcatattaaaaatatcaacttaatttcttttatttatacttttaaataataatcaaaaagagacttcttatattgctcattcactcaacaatatttgaaatctcccattttaattatccattatcaaaatttcttttacactatattttcttttagtatcctaacaaattcctttgcaactggagttaattcgttaaggttatttgtaaacactccaatttcaaaattgatatcaggttttaaatcatttattgtatattcctttttgatataagttaaaggatgtgcagaaataataccatcacctattccatcattgaccatattcatcattgaatccaaattttgcacaataatgacatttttcatatctataaaatttccattttttgtattatccattacagtttcaaatgccgatttagtaagaattaaagtatgatctaattttgataaaataacttttctttttgaagaggattgacttatacataacatctgatcctcttttattgttatataatcatattgatcatatggtgatgttgaaaaagctaaatcaaccatataaccatctaccattgcttttacttcttgaggtgttccctctctaatttcaattttgacattgggatataattgatgaaacatctttagagtatgagatacatatgatgctgttaaagatggtaatgaagctattcttagagtaccactaataagattgttttcttgataggctatttgagtaatacgattatctatatcttccatttgtctaactagagatagtatttttttaccaatatcagtaataactaagccttttcttttatcacggtaaaatagttgtacttttaattcatcttccaaatgcttaatagcatgactaacagcaggctgtgatatgtataacacctgagcagcaactgtaaaactattaaattcagcaacttttataaatatctcaatatttctatctaacataacctttcattcatctccttataatattttctagacatctcttataactcatattaacacataaagccataagaatgatacaaaacatttaataaatagttgaaaattaatgtgataactaattagttatgtcatcattattaaatttgtattttagttatttacaaatatatactaaaataagtgtaacaaggaggaatcaatatgaaaaagacattatacatgatgcgtcatggacaaacactatttaatgaattaaaaaggatgcaaggttggagtgattcgccacttactgatttaggtattcgtcaggctaaaggagctcgtcaatattttctggataatggaattgtatttgatcatgcatactgttccacttctgaaagagctatagatacattggaaatagtaactgattactcaatgccatataaaagaatgaaagacttgaaggaaatgaattttggcaaatttgagggtcaaagtgaaacattacaaccacctagagacgtttttgaaaatttctttttagattttggtggtgaaagtcgccaaaatgttcgcgatagactatataaagctaatttaaagataatggaagaagataataatacagttttagtcgttagtcatgctggagcatgtgggcatttttttagtgtcattgaaagcgttgaaagattgcaagaggaagtaaaaattggtattagtaattgttcgatttttaagtatacctatgaagacggtcaatttacatttgaaaaaatcattcgaccattaccatcagaagaataattatagaaagcactgaattatacatacacatacaaattcactaaaaatacagttaattaaagcctagtgattcaatagaaatttatggctcttaaacaaaattaaaacaacttaaaagttcatttaagaaaataataaccatttctatcgaagaagcttgtaaatagacaagatgttcttaaaaaagtgtgattaattcacactttttaatttctaaatataaacactatttaacacgcttatacaatccttcaactttaataaaaagagcgctatttttcattctcgtccacaattccacttatcaagacgaataaatataaaagagtctttttattatggtcttaaaaaagttttatctcatcatttttgagactactatcattgttctagactctattttttaattttcattaatgcttttttcttgtaacatcaagatacttaataaaaaatactaactatactttagatattcaataactcatttataagtcctaatgtgataccctatttcagtttataattttcaggtatatttcttctctatctatactcatcaaacaatgtccatatcactagaaaacgtaattttttacatatatttaaaattgctacactatttttattacctatttttaaatatacaaaataatagatatcaatttaaacagaaaaataatataataatttctattatttgataaaaacatttaaaaccaatatgatttttcatcatatttcatcttttacctttataaaaatagaattatcatgtaatcttatattataaagtaaaggagggtttaatatgctaaaagcaattatctttgacatggacggtttgatggttgataccgaaatcatctcattccaatgctacaaagatattattgaaagttatggttttaactttacaaaaaaagaatacatagaagattatcctggaaaatctgttatttcatcaatgaactttatcaaaaataagtataatatagactttgatacggatgaaaagataaatcaatttaaaatattggaagagcaatacttactaaaaaacagtgtagaattaaaaaaaggactaattcaactattgaagtatttaaatattcactattataaaacgattgttgcaacttccagtggtaaagaaagggccgaaagaatacttggtgaacataatcttatgaaatatttcaatggtattgtatgcggtagtgaagtagaacatggaaagccggctccagatattttcttaaaagcttgtgataaattaaatgttgaaccagaagaagcacttgtattagaggatagtgaagcgggtattcaagctgcatctgaagcaaaaatatcagttatctgtatccctgatatgaaatttcctcaagaaaaatatctaaaaaaagttgagcatgtctatgattcattagaagatgttatttcttatttagaaatgaaaaaagatatttcaaaatagaaatatctttttctcttatcaagctatctatttaatcacttaaatcatcaccattagtggcaataacttttttgtaccaatagaatgaatctttacgataacgatctaaagtttttaaatcaaattcttcacggtctacataaataaatccataacgtttgaccataccttcatgtgttgaaatcaagtctactgctgaccatggacagtatcccatcatttcacaaccgtctgtgattgctaattgtacctgttcaagatgttttcttaaatattcaattcgatattgatcatgtactttaccgtcttctgttaatttatcatatgctcctagtccattttcagtaacgatcattggcagacgataacgtgagtacatttcacggattgttgcccggaatcccattggatcaatttcccatccaaattcagtagttggtaaattaggatttttaaatccacgatagaatccggcttcaccacgagcagtttgctgatcagctccaggatccattgtttcagttccatcactagcttcacaagtagcagtattgtaatagttgaaaccaataaaatcaggatgtccatttttcaatgcttcagcatctccaggtgcaaatgttgggcaggcatcatgttcttctaagtaagcccaaactaaattattatatacaccgtaaactgccatatccaaatataaccagtttcttatagcattatagttttgtgctgctagaacatcttcaggtttacaagaagcaggatagactaatgaaatatttggtgcaggtccgatttttgctccaggaatcatttcgtggcataatgccattgctttagcttgtgctaccagcatatgatggttttgctgatagatttctttgatttcgtttgtgcatccttccggcaagtgtaatgtaccaattaccggtccaactaaagtcagcatattttgttcgttgatcgttagccaatatttaacacgatcaccataattttcatacataacttttgcaaagtttacaaaccagtcaaccgattctggattaccccagcttcctctttcatctaaagcagccggcatatcaaaatggaacattgttaccaatggttcaataccgtattttaaacattcattaataacattattataatattcaattccttttggattgacttcaccagttccattaggtaaaattcttgtccaagcgatagagaaacgataagtcttgaatcccatttctgccatcaatgcaatatcttctttataacgatgatattgatcagcacacacatcaagttctgaagttccttcaggtacttttttgacatcctgacaagatggtccttttccatcgattaagttagctccttctacttgataagcagatgttgaagctccccataaaaaatcacttgggaatggttttagttttttgtgtaacattttatttcctccttttaaatatacggttttatagtaatttaaaacttaattattttcaatcggttttccaaagaaagaaacaatgtgacataatttaaagaaaataagtaaaaaatatgcaacattgttgcatatcactttaaatatattttttcatattcgtcattaaattgaacaatcgactgataatcgtctgtaaataacaaagaaaatagacaattaataatatattgagcagaaacctgaaaaatcatatctcttaattcaacaaaagagccaatatgaatcgcagataaaatttcatcgcaatatcttgcaattggactatcttttctcccagttattgcaataatttttatttccttatttttatgtaactcttgaacaactttaagaatcttttcatcttctcccctacggctaatcacaaaaacaacatgctcctttaattcagttaaagttaaataaagctgctgatttgatgttgtataattattagctatctttctctctaagaaaaataaatgacatgcataatctgcaatacatgcatttgcatcactactaataaaatcaatatatgtagttttctttaggagttctgctatatattctatttgttgtaatgataattgattttttgttttttcaatgacatttttttctagttcactaattttatcaacaattgaaatacttttttctttttctgtaattttaatatcagcagcttgatattcttttaaatcatgaacaagatgaattttaaaatcattataattttcatatccaatcttttgcacaaaccggataatcgttgaagcatttgtataagtttcttttgctaatgctcttgcactcatcttaacaacatcttcactgtgatttaaaatatactgacaaattatattttgcgtttcattaaattgcttactgtcatttagcaggtctactaaattcatattaatcacccactcatattttacaataaattttctaaaaaccaaacaattataattctaactgtagttatttcattaaaaatatttaaatttaataaactatcctaatcttgagtaaaaacaattcttttaattttaccattttcctcacgttgaacgcctctagcataacgaatttcaggataaccaaacccaaccattaaactaatataatgatcctcaggaatttgcaataatttcattacattaggcatattacctagaactgccaatggataactcatacatattgcgcccaatccatttgcattacataacaattcaaaatatgcagctgccatattaacatcctgaacagcacaaggaattttttttggtgcatgaggaatcaaaatatgcggtgctccacaaaaaatagagtctggccgaactgatttttcccatgccatcatttgattatatgaagttttatcaaacccttgtggatatatgccattattagctaatttaatcatttcatctctaactaataagcgaaaatagtccatttctttacaatcatcaataatggtaaactctaactttcgcttattgccaccagttggtgcatattgaatactccccattaattcttttataatttttttatcaacatctttattaagataacgtctacaagcacgacgagtacgaaccaacgccgacatcattttcccagcatcttgataatctggtaaagttacactattttgaggatctttattaaaaatagaaattgccccagttggacatacagccaaacaatgatcacactgccaacatccatcccaaccaaaacaatcaatttcttttatttttaattcattcttatcatcaaaaataaacaaatcgcctggacaaaccttcaaacattttccacaatgaatacatttttcaagactccatttaaaattagtaatattcataaatattttctccctttcaatagaattaattttataatttttaagctactattataatatcaagtaattattgattaaaaaagaaggcacttttttgttagaaatgagatttataacacaactaccggcttagctctatcttgcttaaatgactctaactatttataataaaattaacttatctaaaggagaacaggaccaatgataaaaaaagaaaacttgccagaatgtccagttgcaacaactgttgaactaattggaagcaaatggaaattattaattctgaaatatcttcttaacaaaacaatgcgttataatgaattgaaaagagaaattgatggaatatctcaaaaagtcttaacctcaaccttaaagtcaatggttgaagatggaatcgtgattagaacatcctatccagaagtcccaccacgtgttgaatatagtttaagtgaaattggtgaaagtatgcgaccagtaatcgacgtaatggctgattggggaaatacatataaaaataaaaaataaatttgtgatatatcaaaaatgattcacatatgccattatttccacaagagttaatataaaatacatatatgattttagtatttaaaactaattgaccaatttcaaagatgttagtatcctatttacttttatttaaattaaaattactattgtaacttagccacaataatagtcaataattttatttaatatgtctctcatttatacaatgactatcaaaaataatgaatatttgttaaaatcaaatagtaagaggtgattaactattgtaaatcaaacgatttataaaaaaatttatatatagatatcaaataacgccaaaaaggagtttttcaactccaaaaaaattaatagtgacaactattgattattattttaataatttggaatcaaaatccatgccgttttttctaggtaaaaaatgatacggataagttttctagcaaacgtgagtctgtgcaactcgccagtgttttccttctttgattgatagtcatatataacaggattgtttaatgcaaaagtatctacaacattcatgataatttgacgaagatgagaagagccatgttttgccatgtaacctttaaaattatcttgtccagactcatttctgaatgattccagcttcaatatcttttattttagcattaatatttttgtagatttcaagcaaggtgctatgactggttcgaagtaggtttgtagtcaacggtcgtaagatatcaaggaatcaaaacagaatcaatcttatcagttttagttttcctaagagttgaggctttggaaaattgtttgattaaaaaaggattaatctccataaagtcaaaattgtaggctttgaggaattgtttaaggctgcttctgtaatgaccagtggcttcaaaacctatttttattttttgattcttatcaaaaaatttaaggataagaagcaattgattgaacccattctggttattaacgaaagtaaaagaatgacgaatgacttcaccattatgatcatgaatgaagcagtcatgcttgtatttagcaatatcgataccaactaaataagttataaaaaacctccataaaataattcgcactgtcagtaagaccacaagttttttcttcatgtattcacgttgttcataaagcatcgagtgctaattaacttaatcaacaatttgaaaaagaactgtggcaggtataacctctaaacagtcaagctgtagaaaaatagggacaaatccacagtgctaataaaattatatcatcattggccctggatgatataaatgtatataagggcagaaaggagaatactcaacttagtgacctaaattgagtatacgtgataaaatggaaataacaatggaaatcttatataatatcttagatgcttatgcttatgcttatgcttatgcttatgaaatagtcttcgttgatcgaaatcatattgtacgctatatgaataaaaccgcaaagcaaagatacggctcaagagttcaagttggcaatagtttattcaattgtcataatgaaaattcaaagaaaagaattgaagaatttctagaacgcgccgatgctggtgaagaagaaatgtttgaagttcttaatggtaaaactggagaaagagagtttttcgttcctgttaaagatgcatcaaaaaaagttattggctattttgaaagacatgaaatgttctggtcaaaagacaaaccagaggctcctatatttgaatattggaaatcaaaaaattaaataaaaaagacagcaatatatcttactatcttctaaatatacattttgtattctattagaaaagaaattcatatgactgtctttttatttgttttaaatgattaaccccctaccataaatttctaattattattttataatggcaagtctttttttgaaaccatataataccgattatatataaaataattgcaattaacagcatagccattaatccgcttttatatccactaccttctaaaatactttttgtatcatataaagtattaaatgtaatatatttcaaaaattctaaattttctgacaactttatcaacataattactacaaaaaatacaacggaatacctaccccaaacatcaatgagttcttagaagtattaaatatacatgatgaacaaaaacatataccgcttattcccagctgatacaaaaaagcacctaaatttatcaataaaaatgtatcaatatcaagaccagacagtttcgcagcaagatgttctcaaaaaaatatttttgatttcatcaaacggagtttttaattcattaaaacaagaacttgataatttatatgaaaacaatgatattttaacgtgaaaaatcttatattctgcataataaaaagcctagttgaaattgctgaatgcatattcaatcaagactttttataaaaaacaattatttagaacattctttaacaagaaattcataatgatcctcatatagatctaaaataatatatgttaagggcaatgagaaacgtttttttccacaacttccagggtttaaatataatgttctacctttttgataacatgctaattgatgtgaatgtccataaatataaaaatcaacatcctttttagtgtctaattgatgaatcaaataaaatgaataacctccaatattaaaatattcttcttcattcagactcagcttgtcattattcccctttacaacaaatacctttgtaattgtttgtagacgctccaatatttttatatcaactatatcaccagcatgaataatataatcacattgtttcagttcatttaacacttcttcttttaatatgtcatgtgtatcagcaatcactcctactctaatcattatcatttcatcctttcccaaaatagcaaacgcctcatcttctatatgcttcttttcaaaaattaatataacaaagttattctatatttacaatcactcatatcatgaaaaataaagtatccaatataaatacttaaaaaatttaatattagcatatttcaatcgggaggaatacaaatcagctgaatttattctatgaaaccccttcctttaatgctataatcataacaaacaagaaataataatagttattttaaatatgaaatgatcacaaagtacaataatttaataattaaaataatagactttatttcctgtttcataaatttattctaaggagtaagtaaaaatgagtttaatcgataatttaagtaatgagaaactttttacaaaaagtgagatcgaagtcatcaattttattaaagaaaatcccaatctagtcttaaatatgacaattggagaattagctaaccaaacattttcgtcaaatacaacaattataagaatttgtaaaaaactaggatttaatggctttagagatttcaaaatagaatacctaagaaatatcgaatctttaaaatatctaaataacgaaactgatttcactctacctttccaagaaaatgaaccaacctggcaaattattaacagtatttcaaatgtctataaagatagcattaatctaattaacagtgaattaaatattgctgaattagaagatattgtagaagttcttgatactagtccacgaacttttgtttttggaattggtgattctaaaattacagcgatgaattttataaataagctagttaaaattggtaaatttttcattttgacaactgaaaataatgaacaggaatctttttgtaaaggaatcactaaggatgattgttgtttatttatcacttatgataaaaatgaatcctataaagcctgtttaaaaattctttttcaaaaacgctgcaagattattgtcattacttctaactgtgacaatccattagtcaaatatagcaattatcatataattattcctcataaagaaaaagatgaaaaaattgctactttttattcacaacttgcatttaattatattcttagtattatctattcactgatttataaaagaaataaacactaataacttacataacataaaaacgatagtctttaatcactatcgttatctatgttattttttaataaaaaatcatgtaattccttatccgttaaatcttttatttttgtttgataataacgcattgtatctttagttttattgctgatataagcattataatcgattttttcattataaataccgtagaattcatatacatatgccatcccaccttgttcactgatactctttttaaatgttttaataatattttttaaatcaaggctagtatcaatataaagaaaaacctttggcccaacgtttttaattttatagattgctttaattccttcataattacgattgtttatccactctaaaagttttttatatcttgctgcaattaatacaataaccataatttataattctccattccttattactattactctaatctcaaatatcttatattttacactatatcaaattaaaaaacattattttttcatatatccaaaaaaacatctcggattgagatgtctttaataaaatatctatcataaatactgatgtatttttattattcactaaattataaaattattttactttttagtaactagttggtaactttcatctaataatttttctacttgtgttatctggacagtacgatcaagtaaaatactgatccaatgctttttattcatatgataagcaggaaaataatgaatatgatcaattaaggcattgattttttcaggtgtatttttaacatttaaaatatctacttttccttctttatcaatatttaaacatcgatatgggatatttataatcaatccataccattttttagtttctaatatttttaaggtagctgacattggatcacgtgtccacggataatctgcttcagtttgatatttatcatttacataagctaatatcttttttctaatactaattggtttaaagcatgattttaagatttcatccgttaaacttgcaacttcttcctttatcagtgcagtatagcccccaactacattttttatataaaaaggtaaaaatttttcaccgttattttcaaacacatcaatgttgaagcaactattacttatttcaaaacgagcataaaattcattgtttttcaaagttttttcaacaataaaaagattatcaagacgtttgaatccatattttaccagggcatcttcttgcatataataattattaagtacctcatctctatccatgatctagtccccctataattcatcgttgctataacattatagcgtatctagtcattgttttatagtcaatcttatcttacttatatttctttaacgggtacatcttattgataatatttttaaaccactcaatattttctattacttgtaaagatgtaatagtaccttgaggtttatctaataaccgccaatgacatggtaatgttagttctaaaaaagtatagccgttggcttcaagttggtgcccaattgcctctttcatataacgctttacttcagtaattcgtttaatatctgtaaaacttccacgagcaactaatgcagcgtcttttgaaatacatagtatttcgcaaagatctatagcatattcatcagaagttggttttaattttaaattagaaaaataattaagcatgtgaaaaatagtaattggtgtattatcaagttctttaaaatcactgattgcttgtttatgctgccatggctcttcatcagtataatatacaacaactatcttttctggatgattatgtttatactctaacgcatctttaagataattatcacttccgtaaatttctacgtttatttcaaaacgggcatcttttgatttaaatataactaatttattctcaagtttcatcgcttcacaaacctctgccaatagccgctcaatcatcccttgataacaacctgtatgaaaaggaatcgtcactccctttaataacacgggaaaagtactcttttcttcatttttaaactcaattgcaagatatgggcaaacctgttgacaaatttgacacctagtgcatttatcaaaatctgtgattacacaatgaccattagaaatttttaaaattttttgtggacaattaatcgtacaaattccacaacctgtacatctattttgattataaactcgtttcaacattatcattatcctccgtgtttattagatttttacccttactagcaattacttgttgataccagtaaaaagattttttcttagttcgagttaatgttccattgccaaaatcatctaaatcaacataaacaaaaccatatcgctttttcatttcaccagtacccgccgaaataatatcgattggtccccacattgcataaccaaaacaatttactaaatcaatctcaattgcttctttcattgctcgaagatgttcttgtaaatatgaaattcgataatcatcaataattgtgccatccttttctatttgatcaatcgctcctaatccgttttcactaataaataaaggaagttgatagcgatcatacaattgatttaaagaataacgtaaaccaacaggatcgatctgccaaccccacttagtcgttgttaaatatggatttttcccgccagaagataaatttccctctaccatctcaatatcagctacgccttcaacagcagaaaaataataactaaaactaatataatcaactgttccttgaagcaaaatttcttcatcaccggcttcaattactaaatgaccattacatttttttaaataagatttacaagtatttgtatagtaacctcgtacctgaacatcaccaaaataatatgttggtaatagcttttcacgggcaatcacttgatctgtgggattacaagttgccccataggtacaagggtataataacatgtttccaatcataaaattaggattaattttatgtccttctatgacagttaaagcacttgccagcagctgataatgagcaacctgaaacttaacttgatttaaatcttcatcttgctgatagataattcctgccatatgccatggtcgatcagttaaaaagagtgcattgatttcattaaaagtcatccaatatttaactttatttcgatatcgttccatgaccgtctttgcatatctaaccgataattcaactaattttcgatttctccatcccccatatttttttactaatgataacggtaattcaaaatgatgcaaagtaacaattggttctatcccatatttgattaattcatcaaatattttatcataaaattctaatccagcttcattacattccaagtcatctccatttggaaaaatccgcgaccaggcaattgacattctaaaacatttaaatcccatctccgccattaaatcaatatcctcttggtaatgatgataaaaatctgtagctatatgacttggataataagtatctttatgcacatattcatgaatttccctgatttttccatgtcctgctcccaactcaacatcattaatactaagacctcgaccatctaaattatatccaccttcatattgattagcagcacttgcaccaccccataaaaaattactatccatgcttatttcctcctcgacattataaattttatcaagttattttaaaagactaaagaattaaaggaaatgttgtatcaagattacgctttttaataaattgaaataaaaaaagcggaattacgttccgctttgagtattatcttctttcattatctctaacgtagactcccgtcccacctctgcttgtttcgagattgcaattcgtcgagctaaattatcatcatacattaaattaaaataacatgaatacaaaatatcaagaattagtttaatactattttcattagaatatccagcaatttttgaatataatttttcacgagttgaaatatgaaggacaacatcagcatatttttttagctcattatcccctaaacttgttattgcaataattggcacgcttcttccttttaaagtcctagccaaactacataaattatgaatttctcctgaatacgaaataatgattatgcaatcattatttttaattaccgcaggtaaaaataactcttcaccattagtgttacaaatattaacattttttccaattctaagcatgtctaatttaaaaatttgtcccaataataaagaataagaaattgccgctaaatgaatttgattagccttctgcataattcgaagagctttttgtaaattatcatgctctagcaaagctaatgtatctgataatgtctcttgtgcaagtaatgttactttacttgcaattttttgaatattatcagttttaacaaatgggaaattgggatcaatattcttaaaatgagtatctaaataataaacttcttttaaaaaatcagccttaaaatcttcataaccatgatatcccaattttttggctaatctgataatcgttcccgttgatgtatatgttgctacagctagttccttgattgtcatatcctttatattacttcttttttccagaagataatcagcaattaattgttggctttgagataatcttgcacgttctattttttgttcaatcaacatatatttccacctcatctaattttattctattataagtaatgataataagcaaatattgaatataataaaaataaaagaactaaaaagtcaacttagaccttttaattcttctattatagcctatttttcaaaatgagcagccacttcttgaagtccttcaataatatttaaatgttgtggacaaacattctcacattgaccgcatgcaatacagtcacttgctttaccaaacgtttttgtcagatttgcataatattcgccttgtggagtccagcccttttctgctacttcttgtaaatctgcattatataatgaaaaatattttggaatattaatattcattggacaaccatctgtacagtacgaacatcccgtacaaggaatttttatagtagaattaatagctgcaactgctttattaataagtttgtattccttgtcatttaaaggtttaaaattagccatatattcagtattatctaacaattgttccatattagacataccacttaataccatgactacattatctagactagcaacaaaacgaatcgcccaagatggaattgaactttgtggagcatagtccttaaacattttcgtaacttcctcaggtacatttgctaatgttccacctttaaccggctccattacaataactggcttatgatgttttgtcgcaacttcataacatttacgagattgtactcctgcactatcccaatctaagtaattaatctgtaattgaactagttcaaattcagggtgctcagttaaaactttatccagtaactccggcccatcatgataagaaaaacctattttctttactaacccttgttttttcttttcaacaatccaattaaaacaatctaattcattataagtatcaatactatgggtattaatatcatgcaataagtaataatcaaaatattctacccctgtcttttttagctgctcattgaaaatgcgatcacgatcttcttttgattttaaaaatcctgcatgtaattttgttgttaatgtaaaactatcacgaggatagcggtccactaatgcttctttagcagcattctcacttgcaaaaccacagtacatccaagctgtatcaaagtaagtaaatcccctttccaaaaatagatcaaccatttgctttgtttgttcaatatcaatcttcgctggatcattaggatccaatgaaggtaaacgcattaaaccaaatcccaatttcttattatccatattttgcccttcctttcaaaactattataagccttaaagcatactttagcgcaagaatttttttaaagataatataaattatttactaatacaaagacagcatttttgcttatttatcatttcaaatttttttagtgcagcttctattaaattatattgataatcataaatatttagcaataaaattgaaaaatcctgcataatttcataattataaaattttttaaaaataaaataatctgcttctaattccttaattaataaatgacattgattagatggtactataattgtaattactttcatcttaatactcctccataattgttcaaataatactttatttcaattataaaacttatagtgaactataagtcaattagaaatattcgactatagcttcatcctatagccaaacagctttttttagtattataaaagtatgccatttttctttataatatttatattaaaataaaaggagaacaaaaatatgttgaagataaaatatgatattgttggttcttttttaagacctgaaaaaatcaaagaagcacgagcaaaatattttaatcaagagattgatctaaaaacacttagaaaaattgaagatgatgaaattgctaaacttgtcgataaacaagttgctcatggactaaaaattgtcactgatggcgagtttagaagaagatggtggcatttggactggttaaaagaatttaatggctttacaactcaacatcttgataaaacgagaaatggtgtaacaaatcacattgaattaggaatgatcaacggtaaaataacctatgataaagataaatatcatccagaaatcgaggcttgggactacttattcaacctagtaacaaaatatcctggaattgaggccaaaaaatgtatctctggaccaaatatgatcttagttgatcattttcttcaattaggtttaaaagaggtaccatattataatggtgatattgatgctcttatcgatgatattggaaaagcatttcaaattgcaattaaagatttatatgatcatggttgtcgttatttacaaattgatgatacatcatggacctatatgattgatgataatttccttttaaaagtaagctcacttggatacaaaaaagaagatattttagaatggtttagaaaagtatctacaaaagcattagaaaataaacctattgacatgaccattgctaaccatttttgtaaaggaaattttaaaggctatcctcttttttctggtttatatgatactgttgtccctatcatttgtcaaatcccatatgatggcttctttgtagaatatgatgatgagcgttcgggttcatttacaccatgggcacgattaaaaaatactaatgttacttttgtagctggcttaatttcaactaaaaatcctaaactagaaacatatgatgaaataaaaacacgttattttgaagcaaaaagaattgttggtaaaaatattgcattatcacctcaatgtggcttcgcctctgttgaagagggaaactgtattgatgaaaaaactcaatgggcaaaaatagaccttttagtttcatgtcaggattttttataaatcttattagagaaacaattagtttctcttttttattttcttcattatataaaaaacaattgacttagagtcaagtcgaggttgtattatatgaaaaacggaggaatatatatgtttaaatttattgaaccaaaaatacaattagataaaaaacggcaaatctttacaaataagcatctacgagctctaatcatccccttgatcattgaacaattattgatcttattagttgggatagctgatactctaatggttagttatgctggtgaagcagccgtatctggtgtctcactagtcaaccagttgaatacggtcttcattcttgtctttactgcattagcatctggtggtgccgttgttgccagccaatatatcggtaataaaaacaaggaaaatggagtgttagcagctagtcaattagttatgataacaacaataatttcagttattttattagtattatcggttatttttcgagaacaattactaacattattgtttggaaaagtcgctccagatgtaatggatgcctgcttaaaatatttagttatttctgctttttcttttcctgctttagcaatctataacagttgtgccggattgtttagaagtatgtctaaaacaagtgttatcatgtatgtatcaatcatcatgaatattattaatattattggtaatgctattggaatttttattcttcatgcaggtgttacaggagtcgcatacccttcactaatttctcgagtcgttgcggctttaattttattaattatatcttttaatcagaaaaatattatttatattcgcattaaggatatttttaaatggaatgctcaaatgattaagcgtatcctaaatattgctattcccaacggtattgaaaatggcttatttcaattatctaaagttgctttaagtagtattgtcgcaatgtttggaactagccagattgctgcaaacggggttgcacaaagcttttggtcaatggccgctcttttttgtattgcaatgggaccagcttttatcactgttatcggtcaatgtatgggagccggtgataaagaagcggcggactattatatgaaaaaattattaagaatcacttatattggcgggatcatttggaatattgtatttttcctatttacccctatcattcttaaattgtatagtttatcgaacgaaacgattaaactaattattattttatgttttattcataacctatttaatgccttattatgccctatagcctcatcattatcaaatggccttagagcagctggtgacgtaaaatacacgatgtatacttcaattttttcaactgttgtgtgtcgtgtcatcttatcatttatttttggggtttggatgaaccttggtgtaattggaattgcattagcaatggttggcgattgggctattaaatctgctcttatcttagtacgttatttacaagggcaatggaaaaattttaaagtcatctaattatcttgactatttatttttaaacaaactgattatttttcatttttatctgtgctataattaaacagaggagtctagttataatgaaaaaaataataaaacctattcaaccaataaaaccaagcccaccaacaaaaaacaaaccaaaaaattcttcaattaaaaagccatctaaataaatggctttttattattataaaaattctctttttatttcagaagaaatatttttaattactttagatgtaaaaggattactgaaacctgagtcttttaatgcatctaagtaatcaacattgagagtgttttgagtcatattgcgatatgcatttaatgcatcttcacgattttttgtacctactaaccataattctaatgatgaaactgcactcgtagcataactaatataataaaacggcgtttcaaaatgatgatgaatatcgacccattcatactctaaaggataacccatatatttttgataaatttgaccatgtaaagtattcatttcttctaatgaaatatctggattttcaaaaacttttcgttgaaattcatcttctatgcatccttgtaagatgctatttaacatatcattaataacctttatctccattagttttgcatcactaccgtatatttcatcataatattcaaacatcaacagctcaaatgcttgtgaatgaatctcggcaatatcgagattattaccatcattccaagatgttcctcccatcaaataaaaattgtaataatgcccaaattcatgaaataaagttgaaggatctttgtagtctgaagtattaataaataaaaatggctcattcccaataattgtcgtatacccagcatggagcatatttgaatcgtcatcaatttggtaaaggtgatgtttttgcatataatcataagcatcttgcattgctttaggaaattcctgttttaatgctgtttttaaatatgaaaaaccagattcgactgtaattttactagtatccaatttttgtaatttttcttgatattttgtatccatctttgctgctagtggtgccacatactctaaaactgcttcctcaaatttttctgcatcttctttactaaaatctcgacctaacaaatcataagcataatccgtataattttcatatcctaattttttcgcaatttcaactctaatactgactaattttttataaatcgttcctaactctttatttttttgttcataaatatcataatacccgtcaatatcttcttgtttattaaaatctaagtcatcaattgttttactctgcccattgatcatcgtagtatattctttagcagcagttttactgtattcattaatcagtgctgtttcttgttcacttagttcctcaatttctggagaattgagtttcttattcttctcataacgttcgataaaatcttctcccatctttttaacaaacgcatctttatatgaagttgtcaaaatagcttcggttaattcgttcatacgattatctagttttacaaaagcactagtaagaaattggtattcttcttcataataagagtctgacaaatcaatattattttttatagatgctaatgactccatttgatcaacctcttttaaatcatttaatatttcatcatatccttttaaaatttcttcttgatttccttctagcactaccttcgctaataaatcatttattttttgatttattgcatcaatatctggtctctcatagctcatatcttcaaaatttaaatcagaatgttcaggaacaacctcagcttgtggttgcggaatattataaccatctgtagtacatccagttaaccccaacataaaaaccaataaacatgtcaataatctatacttctttttcatctttatcctccttatctatctttaataattttttagttatatacaataaaatataaagtattaccctaatttttaacaaaatattcttttgtaaacattactaataaatcttttcatataataaaaaaacgtaaaatgcgatagttataataaacgattcaacgaataaacttaaagtaataatcaataaatatgtctttatcagagtaacaaaaaaattaatctactaaaaaaatgaatgtatctaattaaatatagacaacaacccttttatttgaattaatgcatccatttttagagatactatcttttttacctttacagattattttaactgttgtgccatccattgccaaactctaattccacaacgatcagatactgcctcattattaaagaagtaaatccatgaccaatgaccactatatcgtaatggctctccatctttatcattaaaacgcccagaagtatcaataacatgctttgaaacaaaagtatgaacgttgctggccccagcccctaacaagcgcctaatcgttggcaattcatgggtttcaggggctacgacatcatcatctctggaataaataaagaatattggcaatttttttaattgtttaatttcttcatcagatattttttcatttaaaaaagcttcacaaattggcacataggcattatattctttaccatacttaagtgccatcaacattgtcatatagccaccatttgaacatcctgtgataataactttctcacttttagtttcttttcgataaaaattaatcaattcatgtaaagaatcacaataatatgaagtcccatctgcttccgtaaatttagttgctaaactatcaccagttttatccatccaaaaagttggacactgaggtaccagaatattagccccaccaatcgtattttggaactcttgacccgctaatgaactaaccttgttagctaatacagtaatataaggatcagtattaattgttcctccctcacctagcccatgtaaccaaacaaccaaagtatcacttgcttgcacaggattataagcagcatatttataactcactccatcacaagattcatataacgcttcttcaaacagatctgcactagtaatcttatctttcatttttttagcaatatttatttgtttaactttttgacctaatgaggtcatttcatgtccatcagctatcatgatgtccaattcatataaatcattatatgtattatattgtgtctgcattgaaaacaataatggatttccttctgctggactgattttcatttctatcataataaaattagatggttcactagttatttgaccactatagtctactaaataaacatttgttacagttctataaataatactttcaataatcggatatagcgtatcacaataatctgtagtcaacttcttctctttaaccacaaaactcagattattaacctgatcaattttatgatcgagacttagcaatattttattgacaccgcatccccagtcatcgcctttaataaaagctgtataacttccagatacaatcaaatcttttaaattattatttttactttccatacattttctccctttaataactcctttattataacatatttaagttattcatttagagtctttaaaataaaaatcctacataacgtaggactttttagtcaattaaaccatattttttcattgaattataaataccatcatctttaatatcgtctgtcacttcatcagcaatttcttttaatgcctctttagcattacctaccgcaatcccatattgacaaaattccagcatatctgcatcatttaatccgtcaccaaaagcatatgtattttctttagggatacctaactcatcaatcaaagcattaatagctgaagctttgttaactccaggaaccgataactctccactgttatcaccaaaaataggaacagtgcaatgaattacattaaactcttgctcaaattctttttttattttttcaaaagggaaattatctttttccaaaaaacaaatcttattaacatcatcacgatgaagatcataaccttcttttaatgatccaataaaatgattaggagtttcagctttagttctacgtgcaactggatcattttccaaatccccatacattattctttctaatcgtggaattaaattcttacttgcatataatccaccattactttcaatgtaataatcaaattcattagcctcaaaataatcaacaacatggttgattgctgtgcgagaaacttgtttgtgatataacattcgatctccaatttcaacgaaaccaccaccagctccaataattccatcaaaaccaacatccatgatatgatcaaaaatctcagctttacttcttcccgtacacaaaaaacataaatttcctttagctcttgtcgcttggacagccttaacggtcgaagcaggaatatattcttgtgatggtcgaacatctactaaagttccatcaacatcaaaaaaaataattttctttgtcataataccctccaatatttttataattaatacgattatactattaattaaaatgtatttaactttttttctaaataaaaaaatttatgtctgaattatcataattaactatgaaaatatctaaattatactagatttactactaaaaatagttttatgaggacaagaaaagtttttcccatattcctccatcgattcaagatcaggattttctaaccattctctcaataacacaacaagccctaaaataaaaatatttaaagtttgtcgaacttcttgactacatgaatactcttttaataattgtaaaataataactttcttaatatcttgataaaaagaaaatgaaaaatcttgattcactaaaatcttatatgtttcataatcttttttaagatacttattacctcattgagtaatagatctattttatcatttaatcctcgtcctttattttttcagtaaagctgcttggttgagccaaaaattctttttgaaagctttctgacaaatctattgtatcttaataatgtgcataaaaagtcctacgactaatactagcacttttaatattatcagtgactataatcttacgtgtaggtttcttcttcaataattcaataagcacctctttgttcaaagctttagatcttagggtatttctatattttattggcataattactcctcccaattttatacaatgattacaaatttatctatgattaaataaatctaaagatattgaatattgttgttttattttcttaacagtatagtataaatatacagttaagataagcattttataaaaaagtagaggaatgcttatgccaaattggaaacttataaattattgatcataaaatctttctcttacagtctttaaaaaatatatactaatcataacataaatttagctgataatgatttaaaaattattcttgatattattaagaacaacctttattctattcttaatgaaacgtatttcccaattatattttttaaagacacatgaaagaatatctaactattttaaactcttaatagcaaagcattaactgattcaaaaaatttcaaaggcgtattcttagaatatgcctaaacctttttatatgttaattctccggcccattcaaaacctttttttgcaaatattacaccaatcaattcattaatcactgcggcagtagcaatcgttctttgaataatctaagcagctggagttgaaacagcaattccagtaaatactaaagatactcaagaatgcggtaatagtgtaaaaccaagatatttaatgactgtagcaggacacataatcaaagttacccctaatcgtgcaattcataatattggattaaactcatgcattagtgaagataattcagactcactaaacatatttgcaaaaacagctgaaagtatcattccaatcaatataaaattaagaattggttttggtaaaaaatagtcattaatgatcattcctaaaactgtagctataataattgttttcaccttaaataaacattatctattttttagatcaattggcatcaaaaactatatccatcttattcttaattcttaaaaatatcataattgaccctaatgaatgactgattaaaataacttttccaatgcttttacaatgacttggtgatcttcatgaggtcttaatccagtaacagtaattgcccctgctggtactccttttataaatataggaaaacttcccccacaaagaccatattcttcatcaaaaatcatttgattataattatgggtatctatattatcaagaaaaataaaatacgaggaatgttttgtttcaagacatacccgctctttacggcctaaccatttaatactttcttcattataactattaacaaaacattgcctgattattttattgttataaactattcttgcagcaaatggtcgattataatatttagcttcatcaattattttatccataatcaaagcagcagtctggagattaaaatattcaaaaatatatttatgttcttcttttaaaatatctagtttatttggatgatttcctttatttacaaaatagttataataattttccattttattcctcctgataagaaatctaattaattatattgttgaacccatttgataagcttcatcataacttgggtgtgtgtaagcatcacctttattaaatgctcctaaaccataaataattcctccttcatccacctttttgagcaccttaataaatcctctaaagctttcaattgttccgtgcatttgttcacgatcagtacttccacttgttaaaattaaataagctgtttttcgtttagggctatttctgatttcatattcacgtgcaaacatacgatcaattaaaattttaagctgtgcactcaaactataaaaataaactggtgttgccattacaaatacatcagcattaacaatttcctcaattaccttattcgcatcatcttttaaaacacacctattgtgatgtcctcgacagtattcacaagctaggcatggagcaattctataatttgctaaattgatttttattactttgtgtcccacgctcgtcgcacctttgataaattgatcagctaaaatttcactattaccattttttctaggacttgatgatataacgactatctttttcatataggcttcctctttcattttttattaattttctttttattatcatagcccttcaactttactttaagtcaaggggtttattaagtctaaaataaaagattatggataagttcataatcttttatttctattaattatctaaaaccatattgattgtgtggcacatatggttcttccaaatatgctatctcatctggggttaggacgatatctagtgcttgtaaagcatcttctaaatatttaattttagagctacctactaacggcgatgtaatatatggcttacttaaaacccatgctaaagcaatttgactagttggtttttgatattttttagctaattcataaactcttttaatgatttcacgatcatgagctaattgataatcattttgcagtttaccacagccatctgtccgcggagtatcaaccgccttattaaagacaccgtgagcaagtggtgaaaatggtgtaagagcaatattttcgtattgacacattggaatcatttctttttcttcttcacgatacactaaattatacatattctgcatactaataaattttgcccatccattcttttctgcaatactattagctttcacaaactgccaagcatacatcgcactagctccaatataacgaattttccccattcttactaaatcattcaacgcttccattgtttctttaatcggagtagtataatcccagcgatgaataatatacagatcgatataatccgtctgtaatctctttagcgaattttcaacttctgtaaaaacagctttgcgtgataatccttttgcattaacaccatcaaacattgggtaatacaatttagttgcaattacaacatcttctcgattagcataatcttttaatgcttgtccaagaatttcttcgctcgcaccaagactataataattagctgtgtcaaaaaagttaataccatgttctagcgcatatttaataatttctcgagcttctttttctgcagtttttccagggattcccccacgatctaattcaccaaatcccatacatcctaaacatattttagaaacttttaatcctgtttttcctaaatttacatattccatacttttctccttaaattaacttttattttttggttttagtggtccataaaaatatgcagcagtagccccaccgtcaattaaaaaatctgcacctgtaataaatgctccttggggtcccatcaatagttctgctacatttgcaacttcatcagccgttccaggccgcccagctggacactttgcaaacatatttttataaaaatctcctcttggaccattaaattcatcaatagccaatggagttacaataattccaggtgagatggcatttatccgagcacccttttgtccccatttaattgcctcagccattactcttttttcattacagcgtttagcaagctgatacgcatgaagtgtatcttgaatattatgtggctgcagtacttctaagtccaataatttattcgtttctgtaatagccagcatttcatcaatttcaactcctaaagctggcattcgatgacctgactgacttgaaatcgtcaccccaactccaccgtcttttattactttacctatttcttctaataaaactgcagttccatataaatcaacttttaaaattgtttcaatcgatgcttgactaggtgaaactcctgctccattaacaagcatactaatttccccataattctgagcaaccttaatcatctttaaaatagactttctagatgataagtccatttcaactggtattacatcaaagccagcatcattcattatctttgtaatcctattagcattatcaatatttttatcaccaataataatttttttaccatatccaagtcttcttgcaatagccatactaatctgaccagcaccggttacgatcataacttccttattcacttttcctacctcctcattatttgtatggaatcccatatactttttaaattattttattacttcattaatacaacgtaaagcatttaaacttcttggatatccaagaaaaggaattcctctagaaatcacctttattaaaaaagctctatcgttccctaatctaatatttgcttcaatatgtgataccaactgtggctcacaccctccttgtgctgctaaaaagcaaaatgtaatcatttcacgctgtttgtaatctaagccttttctagtataataatctccaaaacaattatctgttaaccaataattgatgtgttttatatctgctgttccacttttataaaattcacacatatcctgaccaaaaatatcaacctgtgcttgtattcctttttctaaacgattgctttgattagtcgtagattgtccttgtaaaggtaaagtaataccatttttagtacaaaaatcgttaactacgtgtaaaaaaggaaatactctcccaatccctaaataagctgttgcttgataaataatttctttcatttcaattggtgttacaccaaaattatacgcagcagtcagcatcgctttaaattcatcaataccttggcagcctagaagcattgctaaaattgcaatcatacttgttttatcatctaaatcattttgattaactacttcgtcaaatgcgaaattatcaaataattcaataaattctggatctgtttttaataattttgactcatagcctggaaacattcgttcatgatagttttgagcatttttagttattgccatatttcaattctcctttaaccacttaaatattttttcgtcactgtcaaatacttgactaccaaaaatatccaatccctgatgaattattgcattaggacaaattttatttaaatcactaatacttttacctaacccacttccttcatgagtacaaaatggatatatgtgtttattggtgaaatcgtaactttctaaaaaagtccaaagacacatcggcatcgttgaccaccaatttggatagccaagataaatattttcatattcctcaaaatgactaataatatttattatttttggtcttgcattagtctctaattcatctttagctaattttgtacactcatcatatttagacggatattcatgaagaggatgaatttcaaataattctgctcctattatggcttgaacttttttagcaatcacttccgtattccctatttttaaatctttaatagcacctgctacataattttctttccgatgcgaaaagtatacaatcaaactttttttcatcttactcaccctttcttttacagttatattttaaaatattaataaaactataacaattttaattgctaatcattctcataagtaaaacttatatgaaaaaagaactccaaagagttctaaaaatataataagccatatttaatcattatttaataaattacgtagtaattcagcaaattcttcaatataataattagtcttttccttatgccaaaaggcacaataattacgttgtaatggcttgtgatggtgataaagtggaattcgtgtaattccagtcgcaggtggtggtaatgttccaactgcttcaattggcataaatcctcgattacttacaaccattaaacgtccctcttctaaagtatcagcaaataaaaattgattagcaaaaccaagtgtattttgataaaaatctttttcaacctcttgttgttctttagttgaaattaaaatacaggtatttctctttaaatcagtaattgttagaatatcccgctgacttaatggatgccgacttgaaatctcaatataacaatcactatacaataactcataattgtaataatcatcattaaatgctcgtcgttgatcactgattaccaaatcaacttgtccagagcgtaaaagatcatataactcctcatgagttccattaacaattgatagtgatacctcggaatatgttttgctaaatttagcgattgcatgatgtaattcttgagctccataacatcttaaatatcctatctttaaagataactcctgatcttgtccgcgacgtacagtttctctctttaaattatctatttcgcttaccagctccactccatgatgataaaaatactcaccagcaggagtcaaggtaaattgtcgattattacgtttgatcaaatcaacacctaattcctgctctaatgctttaatttgttgggaaattgcagattgagatatataacattgttcagctgcttctgtaaaactattacactcgactacactaataaaatatttcatttgtttcaacaacatatattatcctcccaaaaaacttgtataaaaattatatcatattttttacaattaaagctagcttaagctttcgccattacttttaattactttttgataccaataaaatgactctttacagcttctttttaatgttcctttaccattatcatccatatcaacataaataaaaccatatcgttttttcatttctccagttcccgctgaaactaaatcaatacatccccatggtgtatacccaattaattctactccatcttcatctacagcttttttcatttcaataatatgttctcttaaataatcaatgcgatattcatcatggatttttccatcttcagcaatttgatcatttgcacctaaaccattttcaacgataaataatggtttttgataacgatcccataataaatttaaggaaattcttaatcctatcgggtcaattggccatttccactcactttcttttaagtaaggatttgctgccattttaataccattgcctaatgtcatttcggcatccttgcgagttgttactactccagaattataatagctaaaaccaatataatcaacacaaccattttttaaaaggttatcatcatcttctaaactgttaatcgttatcccttgctgttttaaagaatttacaatataagaaggataatatcctcgacattgaacatcactgtaaaaatattttaatttacgcgaaacatctaattctaaagcaacatctctaggattgcaagtttcactatatgtaagaatatttgccaacatcatcccaatttgattatttgaatctattttatgtcctaaaataactgcttttgcactagcaacgaaaatatgatgtaaggcttgatagtagcgagcgggggtcatttcatgtactcccaatgtatcatatccccttaacaaattaatttcattaaaagtcatccaatattttactttgccccgataatatttaaaaacagttttgcaatattgtataaaatattcaacagtttgccgatttaaccagccattttgatgatcagccaaataaattggcatatcaaaatgattaagagtaacaattggttctattccatatttcaaacactcgtcaaaaatatgatcatagaaatctagacctgcttgattaggtgagctttcatttcccctaggataaatacgtgtccatgatattgacattctaaaacacttaaaacccatttgagcaagtaaagcaatatcatcttcataacgatgataaaaatccactgctctatgacttggataatacattttctcatcaataacactttgataagcttggggaattttttcactaccatgtaaataaacaatcttaccattagaatctaaaaaactatgttttcgttttttattcattgacccatttgttttagtatccgatgtcgcaaggccacgtcctcctaaattataaccaccttcaaactggttagcagcagtagctccaccccataaaaaattatttttaaacattttttatcctcttttcttaaaattttatatcttctaaaaacaaatcattatacaataatattgaaaggatgattttatgattcaaacgaaacaagaattaatcaatctacttcccactatttatcaaaatttaaatactccactatttttaatttctcctgatttaaagatcattgcttctccaaaaaaatttttaaaattagaaataaattattttcaacaaattttcaattttacaattatgaaacagcatgaaatatatattcactttcatcaaaatgccacatatttctttttttgtactaagctagatgaaattccttatatttgtgtaggacctatttttaatcgaaaaataacaacccaagattcacctgctgagtacgagttatttcaacatgtaatctcatcgtatacgctagatgatttctttaatctccccagcattactgtagaaacaaaaaatcattttatttttatttatcaaataattactggtaaaattcttgattctaaattactaaaaattacttttaaaggttctaaggataatcctttaaaacaagaaaattctcttgaaaaagaaatctttcaaattcgcgaaacacctttgcatgaatttagttatacttatgaacaaaaaattctaaattatattcaaaatgaggatagtaccagtgctagaatcttaatgattgaactgcttcaaatcaaagatgaacgtcatttatctaaaaatcagcttcagtcagctaaatataaagttgttgcagctatcgcggtatttactcgtggagtaatcagtatcggtgttcctgtcgataaagcttattcgttaagtgatgtgtatattgttaaagtcgaccagtctaatactattaatcaacttcacaaacttatttctgacgcaatcattgattttacacaattagttaaacgttatcgaaatattcaaaatccctattgggtaaaaatttgcaaaaactatatttctcataatttacataagaatattactttattagatttagccaaggtaacagagatgaatactacttacttatcaacccaattcaaaaaaacaaccggtcaatcaattaaacaatacattaatcataaaaaaatccaagaagctcaatttttaattaaaaactctcaatactctttagctcaaattgctgatattttacaattctcaagtcaaagtcactttaataaagtttttaaacaaattgttggaaaaagccctattcaatataaaaatagttaaacgatgaaagtttatctctcatcgttttttcttaaatagtgaagataagcgcctaccatattagcatcattacagtacttgcacttaacgatctctggctgaggaaatggaataggcaatgattgataaaatcgttttactgccgtcttaattccatcaataaaaatttgattttcactaactccaccccctatacaaatgcgttgtggatctaggatacattgaatattatgaagctgccaaatcacatcatcacaatagtcatcaaaaagctcacagctaatcaaatcacctgttttgatccaatcaaagatcaatctgccatcatccgttttaacacctttagcagctgctattttatcaattaggtttttaatactacccaatgctccaaaaagatgatgattagttacgtcactgattctatgtgcaaaaatcatactaacttcgccgctaatcaaatgacttcctttaaaaatatcaccattaataataattccaccacctaccccagttccaaaagtaagtactaaaccattttgaatgccttgcatatttccttgtccaagttctgcaatggctgcacaccgagcatcgttttcagcctgaataggcaaattaaaataattttcccattctttcaaatcacagtgatcgttatatcttagactcccacccgcataaatatactgccgataaacatcgatgacccctggcaacgaaaaggcaattccttcaatattgctcattttatctaaaactgctttaattgcttttaagaaactttcttgactatcttgaggagttggtattttgccagcttgcgttattttaccatcaatcatcaggcaatgtttaataaatgtaccaccgacatcaaaaactgctatattcataaatcttctccatcagtagcaataactttcttataccaggcaaatgattttttcttactacgttttaatgttccatttccctgatcatcacgatcaacatagataaaaccataacgttttttcatttctccagtccctgcagagacaagatcaatacatccccagggtgtatagccaattacgtcaacaccatcttcaagaatagcacttttcatttctttaatatgttcttttaaataagtaatccgataatcatcttcaacatagccattctcatccacctggtcatcatatccgaggccattttcaacaataaataacgggatttcataacgctcataaaatcgatttaagatatatcgtaatcctttagcatcaatttgccagccccattcactagtcggtaaatatggatttttaaccccggaaactatatttccagctgttgtttcaacattagtatccgttgatgcagccgatgaagaataatatgaaaatccaacaaagtcaacacaaccttctttcaaactttttaaatcatccggctttacttcaatttttaaatctattttttgtattagtttttttacataattaggataatgtccacgaacttgtatatcgctaaacgcaaatgttccataacgcattttttcttcagctaatagcacatcttcaggttttgctgtaagaggatacttgatcaaagttaataccatgcatccaatcatattttttgaatcaatttgatgtcccaatttaacagctttcgcactagcaacaaactggtgatgtgcagcctgaaaacttcgttgtttaaaatctgcttgttcacggccaataattcctgcgacttccggcataaaaataactgaattaatttcattaaaagtcatccaatatttaactttaccactatatcgtttataaattacttcacaaaaattcaaataaaaatcaattaacttacgattagcccagccaccatattgcttagctaaatataacggcatttcataatgagaaatagttacaaccggctccattcctcgtttaatcatctcatcaaataaatcatcataatattttaaacctaattcattaggaagcttttcatcaccattagggaaaatacggctccaagcgattgaggtcctaaaacatttgaaacccatttcttcaaataaagctaagtcttctttatatttatggtaaaaatctatcccctcatgattaggataataaattccttttttaatcccatctgtaaactgtcgtgaaacatctttgctggcactagtcgcaatatccattaaagataaccccttaccatcggcatcatatgctccttcagcctgatttgcagcaattgcacctccccataaaaaatctttacttaacttactcaatttttccaccaactttcgctaattgctcttcttcgtaggctttcttatcagcaattctaaaaaatggataatacattaaagtatttactaccaataaaattagtaccatgatcaataatgaaattcctcctgctaaaaatgcttttacaaaaaatggagttgtccatggtaataatgacatagccggattgtatgtaaatgtaaaaatttgggttgcaaacaaaccaataaagcccattacaacattacagaaaaccattggaataaagaaaacaggattcaacattactggcattccaaaaatcaatggttcattgatattaaacaaattaggaataaaagctaattttagcatcttcttatatctctcacttctcgctgtaaacatcgataaacataatccaagtgtattaccattaccgccaaaagatgcaaacagtgaaactaaagtgattgttaaataagttaatggttttcctgcttgagcatcagcaatatttgtcataattagtgtcatttgtaatggtacaaatgcactatataccgtatttggatgaattccaaagaaccataataaattagcaacaaaatataataagaagattgtcggtaatgataatccaattttaataatgaaggctccaattgtttgatcgaaaaaacttaagaaatttccaaatggagtataaccaaaaccaactcgaactacgaaagcaaaagtaactatgatcattgatataaaaattggttcaaaagattcactaaccattggtggaaccccttctggcattttaaattttaatcctttaccagctaaataatgaaacaaatgtcctacgataatagcaaaaatcaaagccactaaaattcctgtaccgcttaaataggttatatcaaaagctgttatatccccttcaactccagctactgtttgaggaattataatcaggaaacttaataatgataaaattccacaagataaagcattatcgccttttcttttggcaaaagaatgagcaactgtaaatgaaacatataaagctaaaatatttaaactagcatttgaaatagcatcaaaatgtactttaagaccaacgtttgttaaccaatccgaataaccagtaaagggtaaattccccaaaataacaaatatacatactccaaaagtgacaggcccagttctcataaacccctctgctacagactgaattgtatcattctcactcatcttcttagcgattggtccaataaatctattcaataatttctctaacttttccatatattctccttattttttttgaaatacgtatttcattctatcgacaattatcattatagagattaaaaaatattgatttaataaatatttttgtttttttatattttttatcacttgattattatacttttcaataaatacaaaaataaaagagtttcttgttaaggaaactcttttaaatcctattcacttcttaaagctgttacaggatcttctaatgctgctttcttagacggaatcaaaccacctagcaaagtcaacaagacacttaatacaattagaataattgctcccatgattggtaatgttgcactaacactagtattaccagctatttcatgaattaatgcattccccggaataagtagaatcaaagttatccctattcctaatactccagctagtaatccaataataaaagtttctgcattaaagacttgtgaaatatttttcttagaagcaccaatcgctcttaaaattccaatttctttttttcgctctagaacactaatataagtgataactcctatcataatagaagatactactaatgaaatagcgacaaaagcaattaatacataactaatcacatttataatatctgtaactgaagacattaatgtcccaacataatcagtatatgaaattactttatcctcatcaatctttttaatattttcattataactatctaaaatattgattacttcctgtttcgtttcaaaatccttaggataaatatttattgcactaggcttatcaaaatcagcatatcctagatttttaagattcccctcatatgaagaagactcagtggtcattaatgacatcattaattctgagagctcttcttcattcatattcatttttatcgcttgggcaaaaacacttgtatcaatctttatcgcatcttgcatactattagcaagatttcccatttgctcagttatttgtgtacttatttgttgttgtaatgatttagtgatcgtttcggtatattgagtcattactgtttgcatttgcctttccaactgagcttgaaactgttcagttgccccacttgactggagaagtttgatcatctcatcctgcattaatttttgagcctgatcagtttgtaaaaatgccataaagtattcattcattttagttggatcgattaatccattatcttttaaatattgttgaaactgtgtcataactgcctgcgtaaaactctcaatattctctttaggaatatcgactttcatattagcaaaaatgttatccatattaatactcggtaaagaagctgaatccagtttaatctgacttaaatctaaatctcccatatcaaaagaaagtttattttgatcaaatgaaaaagctttcttcatcatctctccatcgacagtaaataaagagttcatatctaattgattgctatttttatcactgaattcttttcctgtaaaaacatcaatattaggattacttatttgtttattaacaatctcacttgaagctgcctgctcaattacatgattagttaacgctgcaggatatccaattccagattgtaacatcgttgcgctggcagaatctttaggctgtacaattccaacgattttaatattctcgccattttgaatcagatttttcatataattttcatcatcagttttatctttataaacattatatttactatcatattgataataatctgaggcattaacaagtttaaactctgttcctaaaatatctttataagaatatgacttaatatctgtaggcacattaacggtttcttcttttgaaaactgttcaatcattttatcaagttctgaataatcacgtaagcctaaagtataaagcataaaatcgttaatatttccatttttagttaacactagaacacattcattataattctttggccaatttccagctttaatatcatattgatcttcataaaggcttgtattacttggcatttgataaaatacatccgtactcatcatcgaagacattaggctatttgaattggctgatgagcctagtcctaatgatgaaaatgacttatcaggatttacttgacgaattaaatcagtattagtactgtaaatttgtggcgcaacattataagtatattcaattgaattagtattctctttgatattactttttccactatcaagatacttctttaatgaagtcaaatcattagaacctattttcgagaacatatttgtaatcatttgtgatacatgtattttagtatcatctttttcctcattattctgattaggctgtgtatcagtcatcattgacgttatatcaaaacctgtactttgaatctgtaatggatactctgaaagagtttcttcttcaattgactgtatatattgattaaccccatttgaaagtgaaagaattaaggcaattccaataattccaattgaacctgcaaatgaagttaaaatcgttcgtgccttttttgtacgaagattgttaaaacttaacaacagtgatgttaaaaaagacattgatgatttccccatattttcatgtcttggaacttctagtttatctgaactaacttcataaggattagaatcactgcgaatgattccatctcgtaattctacaattctagttgcataagcttcggctagttcaggattatgagtaaccataactaccaaacgatcccgggcaacttctttgagtaattccattacttgaacactggtttcactatcaagcgcccctgttggttcatctgctaaaagtatatccggatcatttactaatgctcgagcaatcgcgactcgctgcatttgtcccccagacatctgattaggtcgtttatgaagatgttctccgagtccaacttcctttaaagcatcaattgctcgtttacgtcgctcattcttggaaattcctgaaattgttaatgctaattcaacattagctaaaactgtttgatggggaattaggttataactttgaaaaacaaagccaattgtatgattacgatatgaatcccaatcacgatctttatatcgctttgttgaaataccattaataattaaatctccactgtcataacgatctaaaccgccaattatatttaaaagtgttgtttttccagaaccactaggtccaagaattgcaacaaattcattatcacgaagatttaacgaaataccatttaatgctatttgatgtaaatctccagtaatatattccttagttatcttctgtatttgaagcatatgattttctcctttttcaataataagtaaattctactcctcttaaataaactgaagattaacaaaaatattttcaataaaaagtttatatcaacataattactaaagttaattaaaagaaaaaagaatccaaataaattaatcctaaatcattaatactatatatttctataattataccacttagagtcgttataaagttaaagaaataatattttttctttaacatatattaaaaatactattgtcattccaatttaatttattttataaaaaaagatcatatcttaatgatataatctttattgataatatttttgataataacgaatccgcaaaatatcaaaaatcatcataatttgataattaaattgcaaaccatcaaatttaccaagaacatgcgcaaaataatcagcacaaacattctcataatcacgatatgccagattttgtgtaattagaaccaaataagcatcacaaatattttgtggctttaatttttttacatttctttccatcattctaccagttgctgtaataaagaagacaacatcgtcatcactaaactcaaaattcaaatcaaaatgatgatactcaacaacttcttttcccaatgaaattaaatctgtctggaaatcaactgctacactacttggatatagcgctccaagaataacaattctctgcttattaaaaatcaattcacaaagttcatcaatccactgtataaattcttccttagaataatcagtatttacatgctcaaggaaatcatttatatcagtgtttaacatccgcgcatgaatttgttcaagacgtccctgatgatcggctaaaagacgttctttaaattcatcaaaactatgtattccaaaatgttgacaaaagtccaagagttcttcttgactgcattttgctgcatcaataaatgataccatagtatgattttctatcaatgtataatttttaattataaaattaccaatcctatacatatgatcatcatctaaacacccatttaaatattttaaaatccgtgaaatcattaattccattattattcctacctccttttatcaaacattaaataatccattacctatattatataataattaagttaaaaattaaattaatacatcttttctaactaatttttttgcctttatagcctatcttcttaaccatgccatcattgctcaattgataatctaaacgattaataattaataacaaatacgactttaatattaaagaaactcactataatatacagtgagtcataaatattcaaaatttagtctttataaaaatacttcctgcacacgagaaacaatattattacaattatattgtgcaaaatcaacaggattcattattaaaaaacgtttgtgatacttcgctgccatacttttagtatagtgttgaacttgtggtgccatcaacactaaatcatattctttcgatagcgtatcatcatcatagatactagtggctgaaaaatggtatggtaaatgattattattactaaaatcttgtaacatttgagcaaacattgctgttgttaacccactagaacaacacagtaaaatatttcgttcaccatcatcttcactcacttcatactctttctggcaaacacaaaacattcttcgcttaaaacttttaattaattctttaatctgattacgatcttccatctcataatgaagataaaaaatttgttcattatttgtacgatcagtgatgatttcttctacaaccgaattattccatacgacaatttgtccaaaaagattatctttaagataattatatgtctctttttgatcatcctctttgatacaaaattcagttcccggctgttcttcgtgtaaagtggatagccatgctttaaattcatcagtattaaaatttcttctacaacatcccatttttagccctcctatctacttatatctataaataaataatatcatcatcaaactaaactttcaatttagttaatttaatttcgaatcttaaaagtattcccagcccacttaagtactaaaatacaagcaatgacacaatagccaatacaaaatagaatacaaacaattccaaaggaaagaattggtaactcaagtttagtaaaagcataacaaataatataggtcaatgaaataattgttgaataaataggactttttacttcagtatgcgcattatatggctgcaataaataatataagattaaatagtgtgttgaaaaaaatatgctcattgaaattattgagataaaagatataaatgccagaaatgcttgatcaattcctccacaaataaataaaatagccatatatcctaatgctaaaacaactgctggcaataaattgattttaactatttctcttaaacgaattttaaataatattaaaatatttttaggaattcgataaaaagaataagtcaacattgaatgatcgcagtttacaaacattgcttgtgtaatatttttagcagtatttaataaatacataataaaaacaaaaaaaggtaaaatacttgtcatagcattatttgcatctttttgagtttcaacatcataaaataagataccaattatcacaactattataaatgcaatcatataagtttgtcgtttagctgttttccataaaattttcttatgtctttgcataaataattcattaaaatactcaaaaccagttttattacttttagtatcagcctctaaagtaatcattttatgatatgaatcattaataatatcttgagtatctgtatttaataacgaatcgatattttttaataatttatgactaagctgatgataatcatcatactttaatacataactcatcaaaataaccgctaatatactaaggattattaaaacaatcagcatcatcttaatcggaataatcagattagaaaaaataagtgcataacccactaataaacatccgatactaaatccaattattgctggtgaattattattttcacttcgtacctttcgattccttttaaaatctttaagataagcactaacagccattagctttaaaccaataataaataacggtaatatataacttaaccaaaaagggtattgtaatgtaaaagataaaatcatgaatgctgtcatatatccaacataatgtcggaacagagtatataagtattgtgatagtacaaactctcgtccatccattttcattaaaataactgcataatatttatctttcgagggatcaaacattcctgtattaaaaaatgctccgcctaaacttagaaaaaataataattgtaacattgcacgaaagttaaatacattcataaaattcaaaggtattatgagcataattgcaaaatatattatttttcctaaaaaaactgatataatttcccaaatagtatttaagatagtaacaaatatttttagactttgatttttataaagtgacataggtaacactcttctaataattggaatttgtttaaacatataaataatgctattaacacgataagtatttttcaaacgaaatgaaattagaaaggtatcaagcatgatcttcatcctttaaaatcttgattatcttttcttgaaaagcatcatcatccagatcctctttattaattaatgataattgtcctttattaaggataactatctcgtcacataaatcaactgccaactccattatatgagttgaaaaaataataatatgctctttttttatactttttaaaagctttttcatctcatctgcaacaacaacatctaatgatgttaacggctcatctaacaatagaacatcagggtgtgcaatgaactgaatcaacatctgcatcttatttttcattccgtgtaaaaaatcttttaataaacgatcacgatcttcttccaataaattaaccatatcaaaatattgatcaatagtttttaaattttttatattcttaatattgatctcaataaaaaactttaaaaattctcgtgccgttagaaattccggtactgttggagttgataaaacataaccaatatcactcatcgttaatggcttacggccattatcttcaagataaaaatcgcctttatctatttctaaatcttggttcaaacaattaaacaaagttgttttgccagctccattacgacctaataaaccatagatttttcctttctcaaagcaaaaactgatatcttctaaaacttttttatcttcaaaattcttttgtagatgttcaataattagtttcataacttccctccctatttttactaagtatatcatcgttaaactgtcatcacaataataagcataataaaacaccttcatgcactttacaaaatattatttataaaacaaaaataagaataaactaactaatagtttattcttacttaaatttctttatttaaaaaattgtggtaaatacttcttgtgtgcttctaacatttcatcgagtatttgtcgagctgttatttcactttgaactaatggattaattgccatagcaactagggcatcatcataattgccactaactgccacattggtagttaagatttcaaatgcctttaattgctgaattaatccaactacttgaactggtaattctcctactgggataggaacaggtccatctttagttataatactactaacttcaacgactacatcattaggtaagttagtaattgcaccattatttagtgtgtcaactacttgaatatctcctttatcattgtataatgaagaaattaaattgcaagctgcatcactataataagctccaccacgttgttctaattccttaggcttcacatccagattttcatctttatatttctcaaatagttctttttcaaccttcttcacaacttgagcacgacattgatgtttagctgcatcctcttgacaatgttccagcatttgctgtttttgtaaataatagcgtaaatatccaatccctaaataaccataactatttaaaaattcattgctccatggtaaatcaacaatattttttaaagattctttatttccatcatttatcatcgtatcaatcaaattacgattagcatttttaccgtttaattgaatatctaatgcatagatcatatgattaattccaccaattttaacatctaaatggtcttcttctttaacttttaaaattttttcaatgtctttgatcatatttacaggtccattacataacccaataaattttttccagccagtatgtctaaacactgcttcagcattgattccagaaggatttgtaaaagaaatgatccaagcatttggacacaattcttcacagtctttaataatttcaaaaataaccggaatagttcttaatgctttgaacattccacctggaccatttgtctcttgaccaatcactccatattttaggggaatcaactcatctttttctctagcatctaattgtccgactctaaactgagttgttacaaaatcagcatcttttagtgcttcacgacgatttaaagtcaaatgcacttccatatcaagtccagctttttttatcattcgtttagccagattaccaacaatttctaatttttcttttccctcttcaatatctactaaccataattctttaactggtaattctgcatatcttttaataaatccttctactaattctggagtataactgctgcctcctccaattgtaacgattttaacgcctttcataagtttcctccttcaaattggctgctgcacattgatctaatactacaattacattattgtgtgtttgaattatagagctaggaaagtcttcactaactggaccatataacattctttccactaatttagcttttttatttcctttggcaatcataattagttgtcttgccttcataatcgttttgattccttgcgtaactccttgcgttggaacatcttcaatttttgtaaaaccataatccaatgaactttgaattgactcggggtgtaaatcaacaacatgactttcactatcaaatgaactacctggttcattataagcaatatgaccatccattcctattcccaatatttgaatatcgataggattattaatgatcaattgatcgtattctttacattcttttgtcatatccttagcatttccatttaaagaataaatattttcttctttaatattaattttactgaaaagataatctttcattgctcttgcaaagctttgaggatgatctttttcaatcccaacatattcatcaagattaaaggctctaacttttgaaaaatctgtttttccactttggtatgaatcaattaaatagtcgtatgctcctaatggtgtagaccccgtggcaaaaccaatcactggagcatcattattttgaataaatgtactaatttgctgtccaacatatgtatcaacatcttgttcggttttaaatacataaacttgcataaagtcctcctattcttgtagcaattcttttttcttagcattttttaataaatcacgatctaacacttttacaaatgggaaataaatagcagtagcaacagcaaaattgacaatttgaagaatcaatgcgttccatccccctgctatccagccagaaataaatactggtgttgtccaaggaatctcaatcccctgtaataatggtacaagacctaaactcattgccagatatgtcgtaacacataaaactattggtactattacaaatggtatcatcattatagggtttaagacaataggtatcccaaaaataaccggttcattaatattaaatatagcagctggtccagataacttagcaactgtctttaattctggactctttgccccaaaccaaatagaaacaagcaatgataatgttgctcccgttcctcctgcaattaaatatacatctctaaattgttgacaaataatattaattggctctttaccagcttggactagagctagattttctgctgataaaccgcgccaaattggacccataatagcactaacgacgttatcaccatgaactccgaagcaccaaaataaaccaattagcccctcactgatcatctgtgatggcaatgaatttcctagtgcagataacggctgttgtaaacattgataaattaaatcaaatacagttgcatatggtgtatattcaaaaataactttaattaaaaatactactgttaagataattgccgcaggaattaatgaagaaaatgagcgacttacagccggcggaacagaatcaggcattttaattacccatcctctttctttgatccaatgataactctcaactgtcaaaatagtacaaatcattgcaacaaacaaacctgcagctccaagatatcccataggaataactccccctgaagtgactgtttcaccagcttcagttgtcaatgtaattgtaaaattatttaacaataaaaacgtaataattggtaaaatcaatgcacttgtatctttaatatgatgatattctaacaatgatttagcaattccaataattacaagcagtgccataatattaaaagtcggttctaacaaataacccaacttagcaatattttcagcaccaaaaatacttcctaaaaaattatttaaagcttccgaaggtaaatttgataacaacaagaatattgaaccaatgattaaaaaaggcatgatgctcgtgaagccctcacgaattgcacttaaataacggttttgttcaaccttctcagcaattggcattagagttttctctaacatttgtgtaaatctatccataatagtttcctccctttctttacaattacattatattatttataaatgaaagttaccttacacataatttcgctatacttagagcaattctatgcaaactctggctctaatgcttgattttcataaataattcttttgcttgattataaattttttggccatccaacttcccatatgctttcatatcgattagtcctactatttgtgtacgcagcgtcatcattcgttcaattacaggcattcgataacggatctgtggactcaccaaaacaacatcataatcacctatcacacctactagttcttcaaacgatgatgattcaatataatccccttcatcagcatataaatacattgtttgtactaacaaacttgttgacatcccctgtccgcatacaagcaatactcgcatatttttttgtttttgaaaattttctatacctaaatatgtttttatttcttgaacttgctcataaagactaataatttcttttgccatttctaattgtgtttgtgccccacaaagatgatcttgagcatgaactaaaagcatatttggattaaaatgatctacttttgcacttttagctaacaattttgattgaattttatgcgctaataataactcttcttgagcctcgttcattttaaaatctgcttcttgaatatccccctgacgagcatattcaattgcttccatcgaagatgatttagaatttccagaatgtaaaattaattcaaaacttgtttcattcatcttttctctcccccttatccaatcagttttcctaaattctttgtaaaagtttgataatcacctctacaaataacatcttgaacactttgctgatccatcataaattttgaaatacactcaaataatactcttaaatctttttgatttcctttttcaacacaaatcaaaaaaatcaattgtgccttttgcttcgaccatacgatcggtttatctaaaatagcggtaataacaatcgttttttgagaaatcaaatgatcaggatgcggtaaagcaatcagctgtccatatgccgtactgcctaattcctcgcgacgaatacatgattgaaacaagtcttcttcaaactcattatatttatttgcaacttcacacatcaattgaataacttctttttgatttttggcatcaatcatgcccataaaatactcctctttaaaatactttaataattcacctgcttcactttgaccttgtaaagaattttttattctttgaatatctttttgatcaataaaaaaatttattcttaaagctcgtttaggaatcagtggatgattcaaaaatgttgcaaaaatacagtcataatcatctaaattatattgtggtatctctaacgcattgataatctctaaatcactgatcatttcattaaactcttttaaaaaagtatgttgaatcattaaataatcgcctctacgagcattacaaattattaagacttttttaggattaattttattttctttttttgaaagcgataaagaaaaatgcactgctaaataacctacctcatcactgcttagttgataatgtttttgttcactgatatacgatgccgcaataactgccacatcatacgctaaaggataattcgcctgaatatcttgaatcattgtattttgtaattgcatttggctttctagccgaactaataagggcaccagatgtaaagccaatgaaatcttcaattcaacatcaccataaaaatcaatatcagttttaatcttaatttcctccaacatgccattaacaaaataatcgatttctttgctgattaaatcattttcttcataactacgctttccaagtagatgaattgctaaaaaagatatttcattttcagtaacaataaaatgatatattgaagctaattcatccaaaatttttttggcaattacatgctcatgcccatattgccttgccatttgtggattatcaatgtatattccatgctgcattcgttgaattgaaacacatatgtgtaaaaccaagttttgtaagaccacatcgctaatccgatattttgctttcatcagactatcaacaactatatcacttatagtagctagccattcctttttaattgttgaatgtcctaattgcaattctaattgctctttaataatacaatctcttttatccttctctaagccaacaacaatcatgccataattaggcttatgttctatttttaattgatatttttcgagaactctcttgactatctttaaatcacttgaaacactggatcgtgaaacatacatttgactagccaaatcatccgctttaacaaaatgattatcagataataatgtacttaaaatatatgtaattcgataaccctgattattaaaatcttttttatcatcactttctaataataactgtttaaaatcattatattcttgttgatcatggataatcagattatatcctttgcttgtcattgaaataatttctagttgatatttttctaaaattattttcatctcttttactgtattttgtaatgttttcaaactacaatttactttattagctaattcaatccctttaataaaactatttttattctcatctaagcataaaaatatttgtttctgtcgttcatttagcatcataatctctccttatccataataaatatactctattaataattatttgtccttgcagttttttcgccaagcttagagtaattttctgtaaggatattttaaaagaattgtctatactaaaattataagaagattcttaaggagcgtcaatcatgaaaagaatatttaaccattcatcagtacataatcaccaagcaccatttgttaaacgactaattgcatattttattgactggtatatcatcagtgtcatgacaattttacctataaacttgatttatagcattatctatcatcaaaagaattttactagttcaattgtcaatcttcctctaattcccgcaattagtgcatttttaataggcttactgctctctttactatatttagtttattttccttacaaatataatggtcaaacaattggtaaaaaaatctttggtttaaaaattgttaagaataatgaaattaatattgatttaaaaactttattaattagaaatggagttggattaattttaattgaaggtacattttatagctgctcaatctatttttgggaactgataaacattatctttgaagcatcaatagcttcatttgcattatcaattttaggaatagtatcgtttatttcaatgtttatgagcctccttaattctaatcatcgtatgttgcatgattatctttcaaaaactagtgtggtcacggttcataaataacaaaaatggtagcaagtttatttacaaacttgctaccatttcttattttgaaaatgattaaaaatcaaattcatccgcccatgcaaaataagccgattcttcaagatttggtgtatatggattgatatcaatataagggatactaactatctctgtttgataatcgattacgatgacttctacaacacttaaagcaattggatcttgaaatcttatactgagcattttttgtaaccaatttactaatgataaataagtatcagcaatattagaaaaatctccatatatcatcatacaagccattatttcaacagctgaggtgtatcgaaatttaaaaagcttctcgatagtgacagcttttctaattgatactcacaattctacatcaacatcatattcacggtaatcttcatcataataaattgaaaaatattttgctgaaacatctcttctatgctcagcagtaaagtttaataattcttcctacaacttactttcagcataataatcagaaattatttttctaaatgaaagtacaaaataacttggagtttattttattagaacattataattcatcccatttttattacctaataattctttttttgctaattcgattttttaattttacttgttcctccaatatatttttgctccagttattcaataataaactgatttccttggttatttaaaacaagtgctatctctgttaattaaatccactaccttacaaatatataattttatttaagcgaagaatttgttcacttgaatacatggcgcgatatccagttgtttaatcaactgcagccagttttaaaagtcccatttcatcataatatcttaacattctaacagtagcctatgttaatttagaaaacgctccaattttaaacatgatttcatccatctttacaatattttcttctgtgtatttatcaataaaatcaaaatattctatttcatgatcagcataatactgttcatcaatttgatctaattgattactgatttcttgatttgagtacatctcgattcgtttatttggatagatattaattgcagcttgtaaataatctttacttatcgttagttccaaatctctaaaagcttcaagcgtaaaatcagaatgatgataataatttgaaataaactgctcaactcccccccacattcaacttccatatgaaaattatagagaaaccaaaaattttgctctaccagagtacaatcattaaaccgttcaccataattagatttttcgtcaattaatgtaaagagattaaataatctttcttccccctcttgaactataatttctgtgattgacaaatcaggattataaccattaagtagataattaaataattctccatcttcatcagataatcaaggcttatttaataaaaaataaccaatccctaatagacatatgactattcccataataattgttttcttctgcattatttcttcccttccagcctttatatcactattctattcatagtctcatcaagaaacaaaaaatgacctctgccttgacacaaatggagttctacaaatgaaaactgtgataagatttgcgcagtttttcgaatatttttaaaactggcttgactataaattatattaaccgggcagttgatttgttgacatcgcttaatatgattttgtttttcatactcattcataagctttaaataaaatgaattaacagtacgattccattcccttgacgatattcttattcgttctgatgaactaatgtttttgaatttcgtacaacattctaatattttaaataacttaatctgcttttgaaatattcgatagccgctgcagtatcctggcaacagtgtcaaccataaccatttcggtaaataaatcattgtttctatcaaaattaaacgctcaataaaatatggattacgaatcgcaaaatcaagtgcaaatgcaccccctaaacaatatccaacaatagtacaagatttgatattttcgcacttcactaattttaataccagctgattaaatactaccatattaaaattctttgtttctatcgaagaatccccatatccgcataaatcaactaaaaccaaagaataattttttaataaatgttgcagttgatctgttttatacatttctctagtcatattcattccatgaaaacaaatacagactggtttatttaaattttcaatttcatagcaaagaatatttcctaaataagtcacttgctttctcattttttataacctcgcattagtttataaaatcgaggtaattgtttacaaatatcacaatttttagcaatacattgacaatgcgggccatttattgcttttgacatttttacccaaatatattgaatattttcattcaacacatttccaaatgtcggctcaataaagtcacagggaccaaaattaccatgtccatcaatatatgaatgctgtactccagctccacagccaaattgttctgcactttcaaaatatggaaagacactggctttaggatatcgagaatctctatttaatgtaatatgcaattgctttaattgttctttttcgttatcagttagaacttcttccaatttgttttttaaagcaccacaaggtaagggctccatgattcgcatttcatctatttctaatttttttaaatacagtgccagctttaaaattcctccattaatcagtaattctcgtgtacataccgtttgactcattgtataaagccctgcctttttagcatttttaatagcttcaacagcataatcgtaagcatgatcattatggcgcattccattatgtctttgggcatctaaagaatcgagacttattgcaataccaaataaccccgcttcttttaaagccagagcacgttgataagttaatttatatccggttgtaaaaatataactaacactacgttcatcaatacttgcaataagctcctctaaatcttcacgcaataaaggttcaccacctgtaaaaccaataattgctacacctaatctttgtaattgggcaatgattttttttaattctaaagtcgaaaattgactatttgatgtggcatctttcataaacttagatgcactgcaatgccagcaatggtacatacatttatctgtaacagcaatatatgtagaaatcggagccagccgaatcccttcagtgtgattaacaaaaaaattttttcctttaccaggaaccatcttaactactgtcctaaaagcttcagtattaatcggtggaataaatgaattcactaaataataaccatcatgctggactaaatgatcatttataattatatttaatccacattttaccatatttctaaccttataatcttcatgcttgcgaaattggcaatgcaaatttaaaaatgttttaataatgtggggattgatacacattttaataatcatccgtttgttcactcaggtcaccccttcttaaatattcccatcacgaaatgatgagtaatgcatggtttagtaaaaaacttctgcagctgctcaacaagagtattaaaaattttttcatttttcaaatccaacattgcatcataaccagccaaagcacctgttgaggtaacaaattttgcggcccgattccaatctgtgaaataaaattcttgtttttttgaagttactcgacaattttttaatcccgcttttttagcccaacgttccaattgctgcgcattgtttggcattggtaaatcaaacattaatttattaattgagcctacatattcaattaataattttggataaatttttcgaatttgtggcaatgtttgctgatcatttactaatatatacaaatatcccccattttttaataaccgctgacattgatttaatactttttgtggttgttcgtacatcaatgcccaagtacatacgattgcatcatagcaacaactttcttgtactgttaaaaattcaagcattcctttacacactttattaatgcttgaattctgacattgttttaacatttgctttgaaatatccacaagatcaattgaataatcattatattcttggataaaatttgaattataaccagttcctccagccaagtctagaatacggcctttagaaatatgtttgattagatgatttaaaagaatatcattatatgtatgcattatttttaaatattcttgctgataagttttactaaccagatcataagaattgccaatatcacttctagtcacaatttttcttgttataaataaatatcctacctttattcctaaatggaataaactaattatttttctttttttaacatgcatatatagtcccactttccttgatgtagaaatactatattcagcttattttgaagcgaaaaatcaaccaactgttcaggtttgactggttttattttttcaaaacaacaacgttcaaaaagaaaaagtaattttattctaaatgctctttgattaaaatcatgaatcaaaataaaaccgttattatttagataatttagcatcaatttaagacatttttcttgattcattaaatgatgtaaacaatctcgacaaatgataacatcgactttatttattggaagacctttttgtatcgatgcatgaattaattttacattagtgtttttctttttagcttctttaagcattgataaactagaatccacaattgtgacttgatgaccagcagcttgtaaatcagcggctagtgttccacttcctccgccaacatccaaaatatgatattgccccttcgataatttgtgttcaataacacttgtatcatctaaatgaaacaagcgcataaaatgatcatatatctttgcataactatcaaataaatagctcataattatcaccctttatttcattatattatatataattagttatagctaataaaaaagatacctagtaaagtgaacccaagtattttatccaattatcagatcatggtaacagagcagctttcaaagcataattaaacttcttccaatataaactgctaatttggagattttctctttgagcattagttaatttcatcaataactaaaaatctctctaaaacttttattttatatgcggtaacccatctttatttctttctatagcttaaattatttagattatcaccattattttaaaataaaattaatataaaaatggactattaaaaatccattttctacaatttatgaaaaattggtttcatttgtttaaaagtacaaaattctttaaagccaatcttttttaaatcctttttcatcgtttcaatatgagcacctagatgaactttttcgtgactatcactacctattgtaataattcttcccccaagatcgtaatatagctgaaaaatatcacgtgatggcattaaatcatcaagaccatatctaaccgaagatgtatttaattcaattccctttccatcttcaataatatatttaagtatcctagtgattatctccttgtgttcattgaaggcatcataaccatctttatcatcataacgtttaattaaatccatatgtcccaaaacactgtaatcatgatagtttcttacaacatcatacatttcttggtagtatctttgataatattcagcctcacttagtccagcttgaaaatcattagtccaaaactctttattttcaacttgatgaattgaaagaataataaaatcaaatgaatatttattaaaaagtttttgaaatttatcaatagtatgcatttgtattccaaattccattcctttttttatcgtaatttggttacaatatttctctgttaaagaatcaattttttgaaaatactgtggataattgacattggcaatagtcttttcattctctttaattattaaatttggatcatcccaatctaatttgattccataatcaacatgatctgtaaaacatatttctttaatacctaaaacgatcgcatccctaataacatcctccattagatagcaagaatcatcgctatactctgtatgtacatgataatcacaaaacattttcaagctcccttctattaatgactaaattataacagttatcctatcttttttgttactataccaaattttgaaaaaattttttctattcttctaactactttaatcaaaaagctgcaaaaatattccataatgtttaaagagtctataatctgttcccattttttgtataataagcacaatgatagataaaggagtgagataatatgaataactttttaaaacaagtaaactatttggttatgtatcagtgggcaaaagataaatttccaaatgaatattatgaaaacaatgaaagattttagatgtattgataatacttgaaaaaagttttaatttattgcagctagggatttacttcttcttttttgcttacaacatacaaaaattccttgatttaaatcaaggaaaactaaaaatagaatctgttgatattaacactctaaataaaaatattaataacaaagatgatttgattcttttattaccacttatcaatcgctgtaaagctaacttaaaaataaatttattactaacataatttccattctaaacagtgagcatacttgcaataaatatcccaacgttttatctatcattaataaagatacttaagatgaaaatattgttggttagcaatacaggaatgacagttaacctacttgctgtgcaaatgaaaaaatatccacttcataatgaagtggatatttttaattatatttgtgtctaattacttcttccaacttaaatactccatcattaaattgataaacaaaaatacagcaatttccaaaccctttatttaattcttcagttggatcttgaattgctcttaaaaagttaaagcaagctccactatggctaacagctaaaacattaaaatgatcatctcgttccataatatttgtcaatgtctgcatcattcgatctctaactgtatttgaagattctccaccatattgtaaatagaaagtttcgcaatcctttggtgtcaagtgacaatttaacctttcactctcaccttctaattgaccataaaaattttcttttaacccttttaaacgcgtatacggcatatctgtaactaattctaaggtatcactacatctctcactagtagaacaataggcatgatcaaaagtaatttgatgatctttaaaatattgtccggctactttagcttgatactgccccaactctgttaatggcgaatcacaccagccttgaattttattttgaagattaaatagtgtttgtccatgacgcattaaatataattttttcaccattttttcatcctttctaattatgtcccataattacatgaggctgatagcattcttctaaatattctatatcttcttgtgttagtttaactgttaaagcacccgcaaaatcgtctaaatatttttcttttgtaatccctacaattggtgcagtcacgcctttagcccataaccatgcaacagcaacttgagatttagtgacttgatatttatctgcaatttcagcaactctttcaacaatttttcgatctgtatctacagtactatcatattttcgttttgcaaccaaatcctcttgagctctttttgaatctgaattccaatcacgagttaatcgtcctgccgctagtggactataaggcaccaaagctactttcatatctttgcataaaggaatcatttctcgctcttcttcacgatataataaattataatgaccctgcattacagaaaatttagtccatccatttttttctgcaagatactgtgctttttgaaattgccaggcatacatcgatgaagcacctaaataatgaacctttcctgctctaaccaaatcatttagagcacacatcgtttcttcaattggagtattataatcccagcgatgaatataaagtaaatcaatataatcggttcccaatctttttaaacattgttcaacttcatgcaaaattgcttttcgcgataatcctttcccatttggtccttcgtgcatttgaccgcttacttttgtcgcgattacaatttcttcccgtttagcatactcctgaagcgctcgtcctaaaatttcttcactggcccctaatccataaacattagcagtatcaaaaaaattgattcctaaatctaatgctttttttataatcttacgagaatcagtttcattcagtacccaactatggatccaacgttgaggatccccgaaactcatacaacctaaacatattttagatacttctaaacctgtatttcctaattttacatattccattgtcttatctccttttataatttttcatattcttcatctgtaactggttcacaccactcattagaagcatccttagccggcacttcaacagctaaatgactaaaccagctatcctttactgctccatgccaatgttttatctcaggtggaatatttacaatatcacctggttttaaacattgtactggttttccccactcttgataataaccttttccaccagtaacgattaagatttgaccacctttatgatgaatatgccaattattacgacaaccgggttcaaatgtgacattgacaacaccaactccttctgttgttagatgtttcaaataactttgaccaataaaatattttgcatacgcatcattaggttctcctaattcaaatactgcagatggtcctaaactttcttcacgattcattttacattcctccatttttatttcttagttatttcattaataattgcaattgcatttaatgttcttggaaatcctatatacggttgacattgagtgattgtttcaattaaagtatcacgattatttccaactgttagatttgccccaacatgagctcgcaattgattctcacaacctcctaaagtagctaacatcaccattgtaatcaattctcttgttggtaaatccaaaccatttcttgtataaaaatctccaaaacagtattcagataaataattttgaatgtgctttaattcctttggagcatggtcgtgacctgcttgaatatgctcttgtccaaatgcagcactttgaactgcaaatcccttttcaaatctattatcaccttgtaccgttgcttgtggtaatagtggtaaactaatatttttctcttcaaaaacaagattaactatttctaatgcttcttctactttgcctaatcctatatagggagtgcattgatatactgcttctttaatttctacaggtgttactccgacactcaagccacttgtcacatgttcctttaaagcctttaaagtatgattggtagtattaacgacaattaaaataagctctcttaatttaaaatcaaggttaccatggtgatagacatccccataaagataattaatcataatttcccgaagttctggatcctttactaaaaaatcctttccatcatttaaatcactaaataactgttctgctttcttattcataatctttcctcctctattcttttgttttggcagttaatgttaaagtaattacacaaactgcaatcattgctagagcaatgataaatgcatataaataagagccaaagaaatcatatatataccctaccatagataaagaaattgctgctcctaaattagaagcaaaagaaatctttgggaaaactcttgcataattatctattccaaagaagtatttggttaataaaggcaatgccactgctccaattgaataacatgaaccaaacaaaaatgctccaataattaatagccacgctgttgaaccccacattaataaaataattcctacagtattagctatgatcattgtaacagttgctttaattgcccctaaatgatcacttaaaactccaataatcaatttggaaataatatttcctaccattcccgatgacaaaagcattgctcctaatgcagcactatagcccaatgattgaccatatccaggtaaatgctgagtaacactagtaatacaactacataataatccgaagacaaagaaactaataaatgcaactgttgtaaagctaaatgaatttgacacttgtgtcaccatatcttgtggctgctccacatgtccataaggtaaacaaccatctttttgtggatcaaggtgaaatggatataagacagcgggtaaacataatcctaatataattgcagctttgattaaataaccagtttgccatccaaaattttcaataaagcttgataaaatcggtgaacaaatcgatcctgctaaaccactgaatccaaagacaatactagtagccaaaccatgacttttttcaaaccaattattaataattattgttaagggaacaattgaaaacatacctgtactaagtcctctgatagctcccagcagataaaatcccggaattgatttagttactgccatcaatcctgtagcaactactgctattacaacactaattgtcagtaatagtttgtaagatactttattcataattctaggtatgaataaagccccaattgctgttgttaatgaaaagatagtcatatgcatagaaaatgttccacgcataattccaagactagttgaaacaggtgtataaaagacacctgacgaattaattgaaacccctattgaagatgccgctaaaccacaacatacaattaaaactaaccaatgtttactacttttgctcaccatgttttatcttctccttatcttttaactggtaaatcaaataatccaaagaatctatatttttctgttgattatgaatactatctaatagcttttgacgttctaacttcaaaacctgaatttgctgtttcttcgtatgtgccccttgttcatttaattcgatatatttcaaaatagtttcattgctcaagccaatatttttcaatgttaatattaaacttaatctttcaatatctttatcttcatattctctaataccattaacacggttaacatcttcaaatagaccaactttttcatagtatcgtaaagctgttattgaaacattaaatctcttacttacctcttttattctcaagatgtttcacctccattaccttatctatacacttatattttaagttaattatattgttatgtctaatacctatattgtattatcaataatacctaaaaagcattattgatatatcaaaaaaccaagctatactaatgacaacttggttctaacaattttatttttttaatacaaaagcttcccctggagctacaactctaatcctttctggattaacaacacgtccattcaaagacttaggatcaccattaaatgcattcatttccggagcatcaacagttccccaatgaattaaaattaattctgtattaggatatgtattggccaatttaatcgcattatctaagccgatatgccaagaattatctgaaaaatcaaataacataacatctggttctggcatttgcagatgttcttgtaaaagtctcgaatctccaaccatccaaatcgtcccatcaggtgtatcaatccaataaccgcaataatcttcaaactgatatttacgaattttactatacttactactttcattttgccaagcatgatcagcaggagttaattttattttcatgtttccaatttcaaatgattcaccaatatcatatccatttccttttaaatcttcttctgcgaataattctgctaaataatgaggaccatgaaatgatttagtcactggagctaaatttttacaggttaatcgactaaaatgatcattatcgcaatgtgtaatcaatactccatctaaactaggtacatctttaggtaaaattggcatttcaactaataaaggtagatcaaatccttctaataatggatcaatcatcaaagtagtaccgtgactattgatcatcacaccagcgcttgataaccaataaattctagtttcatcaatgggctgaaaatccttttccgtcataaaaattgttcgtggtgcaacagcttgttttgtcattataattcatcctttcttttcaatgttattataaatcgtcagaaattatatgtctaatacctataatctataatcaatcatgcttttagagaatgctttattttttcaataaatcgcgctgtagcaggtgaaaaaatttgatgctttttccatacgattactgttccagttaacaatggaggataaaatggaataaagcgaatttttgtttcatcattaatattgactaacttttctaaacaaatcgcatacccaatcccctcttctaccataattgcagcattataaataagattgtatgtcgcaataatatctaattgctcataatcttgcccaaaccaattagctatttcattttgaacgattgttcttcgagtacttaataatggcaattttaataaatcttgtggtgttgcatattccttagctgcaagtttactatctttaggtgctaaaataccccaaacttccttttgctctaagcgtacaaactcatacttttcaatatcaactggttcagtcagcaaaccaatatcaatcaatcctttatctaaacgctctttaatatcatcagcattcccactataaaattgatatttgatttgaggatattcttctttaaattctttgattattctagcaagaatatgcatagcatttgtttccccaccaccaataaaaatttctcctgtaactagattatcttgttctaaaaattctttttccgttttattagctagatctacaatttcctcagctcttcttcgaagcagcattccttcatctgttaaaacaattcgattttttcctcggataaataattgcgcgtttaactcctcttcaagctgcatcagttgtcttgataaggttggttgagttatatgtaaaaactcagcggcttttgtgatattttcttcacgtgctaccgctaaaaaatacttaagtactcttaattccatgcttacacctcactttattttattatataaaatttatgacaaaattcctaatccaatctaaagcaatttaaaataagtccatcgtactataaaacagtctatcctattatagactgttttcattatataaattctacttctctttcatttaatcttatgacattcatacttacataagtaaatacattaataattccactgaatatatgccaaaaactagtgaattcttttgatttgtgttgtctagttatataaaatatttcagtatttttctaagattccttcccaaaatacaaatattcaattttatttaaatgaattttcatcaaatacacttgcttcagacagtacgaacatattcataaatggttgaaaaccatatattaacattaatccattttcttttaaacaacttgttacctttaaaaattgtacttctaaatcttcaaactaagtagttacttcaatcatttgattgattatgttatccataatatcaaatcataccttcattttacaacatttctagactgcaagggtcagtaacgtatttttaatacgatttaattctcgaatagctttatcaacttgaaatcgagcatctttgatctttgattgaaccatccaatcagcaatgattccatcaaagaaataatctgcaaaacttaaaaaatcactaatatttaaatcaacatcaaccagctgatctacatcacttaattctttttttagatttcgtatcgaattacgtgctgctgccattgctctttcagcttcattcattttaccatgtttgatcatcgttgtaataaaaccaccaccaatcatatcaaaaagtccccagtttcctgcactacttaaataatcctgagcccttgataaatgacctaaagtttcttcaattgcatgaagtgcttcattaacttcttttttctgattattttccataaactttcccctttgttatcaaatttcaagaatattttaccatataaaaaaataataatcagttaattatataatggcttgtaattttcttttctaattaatataacattccaataaaaaatatgctcccttctaagtacaagtttttatttcacttattttcctagaaaagagcaatttaatataattttttaattaaatttttattaattgatccaacacccttaattcttcgtcagtcaacgtaaaatcttgcattgctagagaatctgcattttctctttgcaaatagtattgttccataatttcttgagtagttttattataaaatatttccatattaataacatcttcaaattgatgcattttttctatgtcaatctcttccatttttatttctccttgctgataggctcttataccctctttaaatctctctaaaccgtcgaataatcgtgattgtggacaagctatattcattcgaataaatccattaccattttcaccatactcaattccgctagtcaaatacaaacccgtcttatcgcgaataaattgtgttaacattgtactgtcagttgttattcgtgaacaatcaagccacaataaataagtagcctcactaggaattaaataaatttctggtaaatagcatcgaataaatttagatactatatttttattttcttcaatatattccctcaattcatcaagccacactgcccctttagtaaacgcagcaactgttgccgtaatagcaaaactattaggttctgccacttcatcagtattaatgccccgatttaccttatgtcgtaattgtggattagcgacaacaatacaagcagtttgtagtccagctaaattaaaagctttagttggagcaatacaagtaatactattcatctgattaacttttgaaacactagcaaacggaatataattcttattaggtgcagtaagatcacaatgaatctcgtcactaattactaaaacattatatttagcgcacatttcaccgatccgctctaatgattcaatgtcccatatttttccaattggattatgtggattacaaagaatcatcatagttgtttgaggatctgccagcttcatttctaaatctacaaaatcaatataatattcttttccatcaaaaattaaatcactcgaaataatatgccgtccattatttaaaatagaattataaaaaatattatatactggtgcttgaattaaaatattttctcctacacttgtcatctttctaacgagtgaagaaattgctgggactacccctgtacaaaataacatccactctttttctagataataattatgcctttttagccaccaggtctgaatactttcaaagaattcatcaggaacgatgttatatccaaaaataccatgctcaactctttgttttagagcctcgattatttctggcgcagtttcaaaatccatatccgctacccacataggaagttcattctctttaatttcccacttcaaagaaccactattccagcggttcgtcagttttgaaaattgatttttcattttctcctcctctaacaacatatacattcgatatttgtttggctttttattggaggatttgttatcacaatttttgtttcactaggatttattttggtcttgtctagaattaattcaccgatactatgtgctttgattacacctgagattggattcataacactatcaatatgcgaatttacctcaacttcaactgtagaatattcaaatgcaagtgttgtattaataagtttgcagttaatcagttttaaattttcaatataacaaagtccttgtaaactctcaatcgtacaatttataaacgttatatttttagaattccatcctaaatattcaccaatgatcgttgaatcataaactgtaacattttcacaattccaaaaggcatcttttgaaatcagctttgaattatgcacttcaatatttcttccaccatcaaaactataatttcctgttaaattcaaatcatcaatcttaatatttatactattaaacccaaaatagtcaccatgtaccctcgctgcctttaaaacaatatccgtgcaattccaaagcgtttcttgcgctattggcaaatctacattttctaaataaatattttgtgctcgacgaaatgtttttggtgcctcaataatactatctataatactaatatttttagtgtaccaaattcctgagcgtgccgtttccaacaatgttgaattagtgactttaacatcattacaataccataatggatatttccatttaaaaatagtctcattgatttctatattcttactttcctttaacggtgattcaccatcagcaaaaatagaatcttcaatttttagattattacttttaaaaagtgctctttcaccgcttaaatatttttgtttaattatttccattttcttctccatttctatatttcataaagctaactaccagatctcctgcacccacaatttgatttatattacctgcatcatctatttgaccaattcgcgtatactgatacttagataagaagtcttgatagaataatactaagcaattgtcatgaaatagcatcaagtctcctttattaatttgattaactgattgactagttactggcaaagagtattctaaattatagaatttttcattaccatttaactctttcattgtaagtaccatcggcaatttttccaataaagcctgggatgttggagtatcatctaatgtagctaaaaacatttgtccattaatctcaatctttatttttatcatttcttttgattcttcttttccttgtttatctatattttgtttaaccagatagcctatcaatattaatactagaagtaaaaaatatatttctttttcatcttatttattaactgcaaataattgcagtatgatttttattgataatattgctatattttaaacgttccgtttcaatgatctctagcgtatgctgaagttcttcaatttgttcaataattacagtatgttgttgatcaagtatcataattttttgttcaaatgacagttttccctttgaatataattgattgaaattcttaatatcttttaatgtcatccccatatcttttagtttttttattcgctttaaatcagtaatattttcatttgtaaacacacgttttccttcaattctttgaattactggtaataaccccaaattttcataatagcgaatcgtcgaaactggtatttttaaaatttcagatacttctcgaatagtgtaacccatcaaaatctcccctttgtcatataaataatcaattagtcatttaaataaagcttttttattttataaattaaataatccaaacagtctaattctttttgaactagatgaagttcatctaataattcctttctttgttctgacaaaatttgtaattgtccttgatagtttttatgtgcaaataatagcataaatctatctactaatttactatcacaacctgcatctaataagttttgatataccgcttcaggtgtatcatttgaacacatcactttatcatctccttcagctatattctaaaatatagcttttcagatagcaaatacttatattaaatagtttcctatgcttgaaaggcatattgatgcatgttaaaatattttaaaggagttgatctgtatggaacttagagttctaaaatattttattactgtagctcgtgaagaaagtatttctgctgcagctgattatttacatatgacccaaccaaccctgtcaagacaattaaaagatcttgaaaatgaacttggtaagcagttactaattagaggtaatcgtcggattaccttgacagatgatggaattctctttagaaaaagagccgaagaaattattgacttagttaataaaactgaagcagaaatgacttctgataatgaaactattagtggtgatatttatattggtggtggtgaaacagaaggaatgcgattaataacgaaagcgattaaagaaacgcaaaaaattcatccagaaatcaaatttcatctctatagtggaaatgcccaagatgtgactgaaaaacttgataaaggtctattagattttggaattttaattgagccgactaatttttcaaaatatgattttattaagctcccttataccgattgctggggtgtattgatgaaaaaagacgcttttctagcatccaaagaatatatcaacccccaggatttaaaagacctgccactaatttgttctaaccaagaccttgttcgaaatgaactttcagggtggctaaaagatgattttgacaaattaaatattgtcgctacttataatctaatctacaatgcttcattattagttgatgaaggttctggatatgccttaacacttgataaattaattaatacatacaatagtacattatgttttaaaccattagagccaaagcttgaagttggactagatcttgtttggaaaaaatatcaaattttttccaaagctgcagatttctttttaaaaaaagtaattgaacttatctaatgcttcattaattaactgctttttttataatggcattaaaatcattcgttgcaaaatctagcgaatcaataataaaaatcttatttccatatttatttttcaactgtggcagtaaataagcaacttgtggtgctaataaaaccatatcataatcatcaataactttatcaatttccatatatcctaccgcatcaacaactatatccaagccctgccgtttaaaaatttcctgcattgaataagcaaaatatgaagttgtcagaccgccactacaactaagtaaaattttattagtatttacattattgaaaatgctctcaccaagcttaattgtgggtaaacaaagataattaaaaaatgtattaaattgattcattgtagatttaaaatcatgcatttgaaaatgtaaataaaacaatatttcatcactatctttattctttacactcaattcaacgattccctcattatgaaaactgattattccggtactgttacttccatcaatacatagagtgcattgattttcacagactttgatatgttcatgcgtcttaacccagcgataaacaaccggttctaataaatcttgataaaattcatccatattaattttcccccttacattgcctagtataaacctaaagttaactttaatgtcaagagggtaagtaactgaaaaatattctatatacaaaaaagctctatcttagtagagctttaacacataattttaaatattttgcaacgtaaaaattgaaaaagcatctttcagggtacattcaaaataggctaacccaacctttgaattgaacctactcaaagtataactataaaaaatgtcattatctaaatacatttttacaagttctttttcaccaaattctaatatatcatttttacattgcaaaataagatgttcagaatcataagaaagataacgatttgctgtcttaataaaatctaagtcatatccttccctttccaaaaaatcgattacgtctccggttgccatataattatccctccaaccttattatagtattaagaataaggattgtatatctacttgtacatttttttagaagctttattataacaacaaaggataacctcaaaaatttatcattaaagtggctatcctttattattagttattgtggcggtaccgtaaacgagattgcgcccttaaatcgagcccataaaaaatatactaacggtaataaaaaccgatcttcactatttacatctttaataataaaatagtctcgacctgcatcctcaactataccaacaaaaacttcatctcgccatttctcactatcactataagtgaaataaaaagtcccaagcttaccgatattcaaacgaatgatatttcccatatatatttgtggtacagctgccggattagggtttttaggcggtatcagtgtaccgtcaggattcacttcagcatctggatcctgtctaacaaaataaggatttaaatcttcaaaataattcataaatgcatctcctttagatttcacatactaaatttggtccgggattataaaaacaatgattcttaaatcgacccgaaaattctccataaaatgtttttgggcaagtaacattatccccagggtttttgaaccataacgcatatgttgctggagcattccgataacctttaattgttttaagcgctagttctttttctttggtattaacaggtccattaaataaatctgttccaactccagcaaaagcatttttctgataaattgcttccgtaatagtaacaacatttttaaatacatcacaaactgcagcaactctattaacgacaacattcccaactaacagcattccttcttgaccttcgcctaatgcttcagccttgatcaaccgtgctagtaattctacttccttactgttgtaagcaatccttgagctcatcttctgatatcacctctttaagactatatgccgataaagcaacaatataactaatttatacagtaatttaagcttttttcgacttattcaaaaaatattattagatataaaattaatctttcgaataataactttattcccgatattttgttaacaacattaacagaactatgataaaaaaacttctaattttgttaatagtatttaaatcaactattttttactttccaaaattatcagtaacgattatgatacgagtgtagttaaggaaagaaggtaattaaaatgaataagagagaaattgaaaaacaagcactcaattcattaaacacttactttaaagataatcccgataaagtattgaatgattttgagcgaaagcctttggataaagaagatataactaaaattgtcaacgaagaaatccaagctcaagaaaaaaaagttgaatcccttgaagtgctgagaaaaaatattgctattgaggcagaagaatcgttagaaaaggttttaggtaaaaggattaccagcaaaaaatctccaaataaattaactgttgatgagatggcagttaaactacaagaagaaaaaactcatcaaattgaaactgcaaataaattaaaaacagctaaattaaggaaataacatttgttaatgccattaacaaataatctaaattgaaagtagaaattttgttaacagcatttataaatgattattatatatagaattattttgcacagaagcatatattacaaatgaaaacaaaagaaagagggaaattattatgaatactaaaaaaatcaatgaacaagctattgaatctttaaaaacttattttaacgaaggtaaagatcttattaaagaaaatgttacaccacttactaaagatcaaattaaagctatcgttaatgaagaaattgctcatcatgaagctaaattacatgaattaaatgatttaaaacaaaaaattgatttagaagcagaagaagcttttgaaaaagtttttggtaaagctaaagaagaaccaaaaacacataaactaactactgatgaaatggcagtcaaacttcaagaagaaaaagaacatcaaatggatgttgctaataaattaaaagaagaaaaattatctcattaaattaattattctaaaaaaagtcacgacaaatcaatatcgtgacttttttattaatctgataacattataaaaagtagttatcaaaatagccatacaaacgtacagttatttcattagttctttttcaaacatttttttacttgttaaaaaagcaattacaagaatcgcaaaagaaatatcaaaaggactctttaaagtaagtattacaatgaacaaaccaacaataattccaaaaatttgaaaagagaaaggctttaatgacaaccgattttccttaattagtttgtattgattaactagattatgtaatgtaacatagaaagcaataatcgcaatcaaaacatcaacagaaaaactgactaaataattatcagttaataattctttgataaaaagtaaaacaatatagccacacatcgtttgccataaaccagcaataatatacttttcaagtacttctttttttatctcttttaatcgctttttactagttttttcttttttcattatttagtaacctttaaaatatgtccactcatttcttcaatatgactattaaagaattcttccatcactttaatcatataagcagtatctttgacaccagctgtttcataagatgaatgcattgctaattgaggtaatcctatatcaacactgttcattgaaacttgtgccattgcaatattacctaacgtgctaccaccagcagtatcactgcgattagagaaaaattgtactggaactccagcctttttacataatcccttaaaaacagctatactaactgcatcactagtatatttttgaccagcatgagattttacaacaataccctcattcatataaacacaattattaacatctgttttcgcaggatgatttgggtgtacagcatgagcattatcagcacttaacataaagcttgaagccaatgcccgataatattcttcttcaccttttcctaaagcattgttgattctacgcatagcatcatataaaaatgttgatcctgcaccctgtttagtacctgaacctacttcttcgttatcaaagcaggcaaatacattgattgattgcttatttgctcccttgagaaaaccttgtaatgaagtatatgcacattgtaaatcatctagttgtggacatgaaataaattcttcattagctccccaaattgatggttccatgcgattatataaatatagatctgttccataaatagtttcaacatcaacacctaattcatcagcaatcagtttctttaaatctcctgctttagtttcagatccaccaaataacggtaacatatcaacttgtttattataagcataaccatcattgacagtacgattcatgtgaattgcaacattcggaatcattactagatctcgatcaatatttactagtttggtaacatagttatcaccttcttgaactaaaaccctacctgcaatagataatgggcgatcaaaccaggtagcacataacatcccaccataaccctctgtatttaattgcgtatacttaccttttatttcaatttcagcattctctttgactttaaaagttggtgaatcactatgtgatgcagcaacattaaaactataattatctaaattctcaccaagattaaaagcaataatgctggaattatttctagtgacaaagtaatgaccacccttcttaatttgccatgtttgtccttctaataattcttcatacccatgttcaattaaaatgttctgcatattagctacagcatgaaaagcagttgggctttgcttaataaaagttactaattcctgtgatatttgtttatccattttcatgacctccataattacggctctattgtaacatatcctttaacatgtgttaaaggatatgtctaagatactattgacttgtcttaccacgtttagctagagcaggcataattgctcctaatccaactaaaataattggggtaataatattcattgcgatttcaaatgcacttcctttaaacattcctaaagcacaacaagctgcagtgacaataaaacaccaccatccaaaaaatttcgcaaaaaattgacttttagtaaagcgatattctgctggaaatttatcaattgctttacgcaatgcaatatatgcaataaacacccataaataacgcagtggcatacaaactgaatttagttgggtcaagaattttaaaaatgccgtaacacttcctattcctaacgccggaattaaaattaatggtgtaacaattgctactaccaacaaaattccattggtatatgcgcctttgtcatttttctttaataattttgcaggaataaattgacgcgcattttcattgtctaataacattctaagtggcgcatcgatagaaattaccaaagttgataattgcccgaccatattacatactgcataaacaattaagaaggtattaccaataccataatactctcctaatttttggaatgaccaatatgctccattagctacatatgaatcaaaattagcattaatttcagcaacattaaacatcattcccattgaaattgtacccaaaatggcacaaataattaccatgattgccaatgcaatcatccccttaggaaatccttttgaaggattttctactttatttacatatggtgaaattttttcacatccacctacggcaaatactaatatcgataatgaagtaaaatattctaacctaaacgatggaattaaatttttaaaactccaatcaatagtttgatatcctccattaggatttaaagccggtgctgccatcattaagataataaataaaattgacattacaaacatcgacgatccagcaatagtcgccaatgattttaatggatttaacccccgtgatgctacccaggcaaatactaaaaatactaccagggtaataatttggactaggcgaatatccaaagaatcataaaaagatgaattttggaacaatacccaacttaaagcttttagcccacctgatgctttagaagcaatataaggcatatgaacaacccaataagtccatccagcatagtaagctaattttggtcctaaagtttcttgaatccatgaactcacaccaccaccagcatttttaaatgctgagcctaactctcctaccattaatgcatatggtacgaagtatagtgcaaacatcatgatccaactaaaaattacttggactccgttaaagtatacaaaaccattaaccacatttccgaatccccaaacagtcgaaaaggccataaaggctaagttataccaaacgattttcttcgaatttgacataaaaccctcctaatcttgaacaacaccgtgttcgttttagtcccgtcgggttgcaaaactaattgtttataaataaaaacagttcatttgcttcgcaacgtttctattataacaaaaatcttatatttagcctacacatttacatttttttattataataatgaaaattattcccgctgtataaaaaaagatacccaattatcctcagatatctaatttactttttttaaataacgatatttaacccatcctatttcgttatctttgatcacataagcataaggaccgtatattcccactaatttaattacctcacctttttccaaaggaatcaaataatcaacatagtcatccaaacaataatatttttgattatttaaatacaaaaattcattcttgatcttaaaaatcttacctgttttaatttgtttgcaggttgaaaataattttccctgcttaagcacctcgacttcaaaattaggccatgccactttattgacaacttgtttttctacattaacatcaactactgcctgatataacggtaacggctgtatatattcttttgataacttaaatctatcgccatcaccagtaattatcaatgcatttaattgactaatagattttaccccagttcccccatcaatactaataatacgcttttgcttatcaatgataatatcattattgattgcattagcatattgatttgatgtcggtaaatgtccaaccacaacatatttatctaaacagtgaccagtttgataaaacgttcgcatttcaataagcgatgaagtagatgaattttgccagtcttttcgattttcaattcctgcatgaacaaaaataaaattattgaattctagtattgttggtaaagttttaaaatattgaaaatatggccgcaaaaactgttttatttttacctgcattacttcaggattttctttttttatgtctatattcaatttttctagagcttgtcgaatcattccgcctttaccaatacgatttaaatagtgaactatttggttagcatatttaggattatctaccatttcttctaacgcatattcacaattaccaagaatcacatatacgcgctcactttttgcctgaagttcttgtaaaaatctaacagtttctaaagcttgcgtacctttttcaataaagtcacctaaaataatcaagtaatcatcgtatcgataatcaaccttttttagcagtgctttaaatcgatctaagtgagagtgaatatcactgattacaatacagcgatattctcctactacttttatttttatatgctgtgcctccaacattcacttcacctctagtcctactatagcataaatatataaataatttacagtaatattatcttaagtatttataaattctgcgttataatcatactagaaacgaggtaataaaaatgttaaaagaaattgaacaacgtcaaagcattagaaagtatttgaacaaaccagttgaacctgaaaaaatcttagaacttttaaaagcagcaatgaacgcgccgacagcccgtaatacacaagaatggaaatttaaagttattacaaattctcaagcactaaatgatatgacgaaattatcaccatatacaacaatgatgaaagaagctccttgtgctattctcgtaatagctgatttaaataaagctatttcacctgaatatggtctaatcaattgtagtgcagcaattgaaaaccttttaattgaagcagtcaatcaagggcttggttgctgctggtgtggaatcgctccagtttcggaaagaattgaaggttttaaaaactattacaatctagctgataatgaatatcccgttggtgttgtagctgttggttacagtaatgaaacaaagccactgattgatcgctttgattctaaaaatattagctattttaaatagaatcaaaaattattctttgttaaaactatttttatttattcaaatattgacttctagttaactctaagatgtatgataaatttattaatacaactataatagaaagaaggttaattatggaaaataaatttggttttggttgtatgcgactaccaatgaaaaatgatgaagtcgattatgacgagtttaatcaaatgattgatttgtatatgcaggaaggatttaattattttgatactgcccacgggtatctaggcggaaaaagtgagatcgcacttcgtgattgtttagtctcacgctatccccgtgaatcatatgtccttactaacaaactaactaaaagtttttttaacagcaaagaagatattcttccactatttaatgagcaattacaaaaaacaggtgtttcatattttgattattatttaatgcatgcacaagatcgtgaaaattataagcattttcaaaaatgtcaagcttatcaagctgctcaagaattaaaagcaacaggaaaagtcaaacatattggaatttcatttcatgatactgcaaatattttagagatgatcttaagtgaacatcccgaaatagaaattgtccaaattcaatttaattatgctgattttaataatcctagtgttgaaagtaagaaggtttatgaagtatgtcgcaaatttaataaacctattttagtaatggaaccaattaaaggcggtggtcttgcgaatcttcccgaagcagcaagtagaattttaactgatctaaataaaaatgccagcaacgctagttatgctctacgctttgcagcgtcttttgaaggtgtatataaagttttatcaggtgttagtaatttagagcaaatgaaagataatttgaaggttatgaaaaatttcattccttttaacgatgaggaatacgaggcggtagcaaaagttcgaaaaatattagattccttaggaggaattccttgtaccgcttgtcgttattgtacagacggctgcccgatgaaaatttcaattcctgacttatttggctgttataatgataaaaaaatatttaatgactggaatagtgattattattatggagttcacacaaaaactagtggcaaggcatctacttgtattggatgtcaacaatgcgaacatatttgtccgcagcatctgccaattattaaatatttaaaagaagtcgctgaaacatttgagtaattaaaaagatactccatgatgcaaatgtaatgaaaaggtagatattagttccaatatctacctttattttacttctatatcatttgaatagtccttttaatatataactttatccaagattccatttacatatgcaataaaaatgccataatttgtcatcggaatcatttgcccttttgcctgattaactcttgtcataatataccggcgattaaacatacagccaccacaagtaataattaaatcgtacttggttaaatcatctggaaaatctgttccactaacaatttcaacaccaattccaggaaattttttctttaacattcgaggaattttaacccgtccaatatcttcacttaatggtgcatgactacaacattctgcaattaaaactgtcgaatcaccattcagccgttctaagatttcaacacttttagcataataatttaaatctcccttataacctgccattaaaacagaaaatgatgtcaatttgctttctgaagaaatattttcataaacatatttaaatacttgtgaatctgtaataacaagatcaggggcttgatttaatttttgtaaagctgattttagttgttccgttgttacagccataatttgacaacctttatcaagcaattcacgcattacctgaacttggggtaaaattaatctgcctttgggagcttgaatatcttgtggcattactaatagtataagatcacctttttttgctaattcacctgtaatactttctttttcaaaatcagccggtaccttttcaagcaatttttcttgtaactcttttattccttgcttcgttaacgaactaatcagtaatggtgtttcactagttgcttcagtaattttctttagaagattatcattcctttgtaaatcagctttacttattactaatatcgtaggaatatgcttctctttaaaataatgataccagtctaattcttgacaaatctttctatcattaaaaagaatgattgcaatatcaatcttttcactagctttttttgtcttatcgtttcgcaattgccctagagtcccaatatcatcaaaacctgcagtatcaactaacaagcatggtcccaaaccatcaatttccatcgccttatagacaggatcagtagttgttcccggttcacttgagacaattgaaacttcttgattaacaaaggcgttgatcaatgccgatttgccactattacgttttccaaaaaaaccaatatggagccgattagctcctggtgttttatttaaccctgccattattagaacctgaaatcacgtttcccgtcttcaatcatcgtaagacgttcttgacaaatttttctaactttatcactagtgatattatctaattccttcataattaaattatcagcttttaacttagtatcatcaccggcataatcttgactatattcctttaatgtcatcaaagcattaggatgacaacaattcgagatttgaccagatttacataattgcataaaacgatctcccgttcttccttcgcgataacaagcagtacaaaaacttggaatataatttaattcacataaccacttaacaacctcatctaaagttctattatcactaatatcaaattgtgcagaagtagtatcttcttcagtttcaggttcatcataaccgccaacacttgtcttagagccaccactaatttgtgaaatacctaactctaacactctttctcgaacccgtttagattcacgtgttgaaataatcattcccgtatatggtactgccattctgatgatcattacaatcttttcaaaaattttatcgctgatagcattactaaagtctgatttatcaatatcatctgctggacaaattctcggaacactaatcgtatgtggtccaactccttttgcggcctctaaatgttcggcatgcatcaataaacccacaaaatcatatcgatacatttctagcccaaataaaaccccaataccgacatcatcaattccaccatccatagcccgatccattgcttcagtatgataagcataatcatgttttggtcccgttggatgcagtgcttcataatttttcttattatatgtttcttggaaaagaatataagttcctatcccagcctcttttagctttttatagttttcaactgttgttgcagcaatattaacattaacccgcctaattgctccatttatatgtttgatcccatatatagttttaatgctttccaatacatattcaattggattattgattggatcctctcctgtttctaatgctaaacgcttatgccccatattttgaagtgcgatgacttctttttttatttcttcttgagttaatttttttcttgcaatatgcttattttttaaatgataaggacaatagacacaaccattaacgcaataatttgataagtataaaggtgcaaacattacaattctattaccatataatttttgcttaatcattttagcaactttttccatttcatcaattgcttcaggaatttcacactccaataacagcattgcttcacggtgcgttaatcctttacagtctttagcacgctcaattaaagaaaagattaattctcgattatctttattttctttagcatatgcaattgtttccagtatttcttgatcatcaataaattcttcagccttattagattttacattatacattttcctttttctcactttcttttacttaggtctaaccctcgtaatcaaatttacaataatctccacgctcatatacaacttcatatcccgccgtctttagcgtatcaattaattcttttaatccttcactcgcttcttgtccactcgctgcttttccatcatataacgagtatttttttcttacctcctgaggtgataaattaggcatcacaacattacaaccatggttaattccctctaagcgcccattagaatctaaagttgctaaagcagttgttgcaggcaatagaacatcctttgtcataattctaatcaaacttaataaaaaaagagtaagttttaaatcaccatttggttggtttttaaaaggcgtattttgatgcactaaatatggtccaatccctaccatttccggctttagctctttaataaacaataaatcattaaccagacaatcaatatcctgatgataacttcctaccataaatccacatcctgtttgaaacccaattgcttttaaattcaaaagacagtcaattcgattatcaaatgacatctcatgaggatgaagctgatagtaatgctctctattataagtttcatgacgaagcaaataacgatcagcacctgcattaaaatacttttgataagtttctttacttttttctcctaacgatagcgtaattgcacaatcaggatataattcttttatttgctcaataatttctaccattcgttcatcttggtaatattcgtcttctccaccttgtaaaacaaatgttcgaaagcctaagcgataaccttctttgcagcataataatatttcttctaaatttagccgatagcgtaatgctaatttattactgcgacgtaatccacaataataacaatcatttttacaataactgctgatttcaattaatccccgaatatagatcttatttttaaatatttgttcagtgattttcgcagcaatcttcttagcgtaatcaaaatcgttttgatcaaatgtttttaataatcttttaaactcatcaaaatccaatgcgccttcttgatgaagcttgttaattaaatcaatattactcattctatccttttgaatatagtgcctttacactgacacctttgagcattccgatttttcccgataaagcccctattacatcatttggtccatcaacgataacagacataactgatacttgcttatctttatagggaattcccattcgcccaataatatagcgactatatttatgcaacaagtcattaatcttattagcactgtctaattcataaacaaaaattcctaaaattgcaattctactttccattttacctccttaaactaaaaaccattagggcgtactaatggttgaacaaaacaaaaataattgttcaccctttgactcagaaatttcctcatcattagctgcatacttatattctaccacatttgaaatgaaaacgttatcattttaattctttttggtttactcttttgtcttcgacacgtataatgaaataaagcgaggtaaaaaatatgttaataattcacaaacttgaacatactcacttttcatcaagtgaagctattattattgactacattcttgaacaaggtttaaaaataaagaatatgtcagccaacagtattgctaaagcaacattcacttctgccccacttttagtacgtattgccaaaaaattaggttattccggctggaacgcctttaaagaagattttattgcagaactcgaatatttatttaaagaacaaaaggtcgatgctagtattccttttgttgttagtgatgatattatgacaatttctaataatatcggtcaacttcaaattgatgcgattcaagacacgatgtccatgctgaatcatgatgacttacaaacggccttacgttatcttcgaaatgctaaagaattagatctctatggagtttctaataaccttttattagcagaaggatttagaagtaaattattttatattcatcgtaatgtaaatatctgtcgtctgcctggcaatcccaaggttcaagcggcaatgagtgatgaaacccattgtgctattttaatttcatattctggagaaacagaatttattattgaggttgctaaggtattgaaaaagaaagaaactccaatcatcgcgattacctgtattgcaaataatcgcctttctaaaattgctgatgtaacattacgaatttcatcacgtgaaatgttacatacaaagattggagattttgcaacaacaacatcgattaaatacttactggatactctttatgcaggaattttttcatttgattatcaaaaaaatcttgattataaaattcaaattgctaaagctgttgatgaccgtcactcgggttatgagtttattgatgaagatgaatttcctcaataaactcatcaattcaaaaccaaacaaaaaaaacaccccttacgtgggtgttatttttatttggtagcctgtacggggttcgaacccgtgaatgctaggatgagaacctagtgtgttgaccgcttcaccaacagaccatgtaaatattatagcactatttataaaaaaaagacaatcattattcaaaacaatttttatcaatataattattagatgttttagatagtgtagtgaatctatggcaaaattatctatacagttgagtatattttagacatggacccagaaatatcaacatcaataattataaaacttatattcattataataataagtaccaactttaaagcaatcagagctaataaaacagtaatatatgccacttttaaaagcctttttaatagaaacaaaattcctgtaaaaaaggcttttatgtatattcaaaatactatttcaatttaagtatcaaattatttcatacttaataacttaatggccagatcgattcttttaagtgattcatttttccctaaaatatgtgcaatttcaacagctccgcccggagtaaatgacttaaaagtcaaagcaactctgacaggatacataatccgtccattcttcacttctttttcttgagctaaattaataaataaatcatgtaacgctagatcatcattaaaattatcaaaagtacttaaagcatctctaacccaaataagagcttctaatgagttttcaggatttgttttcatctttttatttttaaataatgtttcatcagcattacatggttcattaataaaatcaatcatctccggtatttcatttaaataggaaatcctcaattgtagtacttggctcagttctaataaatcaacatcgcgtgtaattattttttgataatacggcattgctagttgatgaaaattttctaacgttaaatttcgtaaataaagtccattcatccactttaatttatcgagatcaaaaattgctggtgcctttgatattcttttaatatcaaaatttttaatcagttcggataaagaaaaaatctcttcctcaccttctggagcccaccctaataaagcaatataattaatgactgcttcatttaggtatccttgcttaattaaatcttgatatgaagcatctccattgcgctttgatagcttatgctgctcatctttcatcactggcggaacatgaatgtacgttggaatttcccaattaaaagtttgataaattatattatatttcggcgtactagctaaatattcatttcctcgtactacatgggttatactcatcaaatgatcatcgatgatattagcaaaattgtatgttggataaccatcactctttagtaacaccccctcatctaaagtatcattatcgacagttatttctccgtatacttcatcattaaaagttgtttgcccctgcttaattgtttgtctgataacatacggtttattttctgacaatagtttctctatttcttcatcagataattgatgacatggatctttaaatatttgatcctctttattacccttaacattttcttgattacaaaaacagtagtgagctccattcagcttaacaagctcatgagcgtacttttggtaaatttctaatctttgtgattgaatatatggtccatatccgccatctttatcaggtccttcatcatattcaagtccagtatctgataatgtttgataaattacatctattgccccagctacttcccgggcttgatctgtatcttcaatcctcaaaataaaatcaccatcgtcttttttagcaatcaaataaccatacaaagctgttcgtaagttacctatgtgcatataaccagttggactaggtgcaaatcttgttctaattttcataaatttcattccatccccttgtattttttccaataaagttttaaaattataaatgtccactaattagggtatagccaagcggtaaggcatcagactctgaatctgacatttccttggttcgaatccaagtaccctagccatgcatttaaaagtagagctttctactttttttattatattcctttcttataagtaaatctataaaaaacaagttgaattaacatatgttaaccaacttgtttttattaattgcctccgggaccatcttgacgctcgcgttcatcaggataatatttggtattattatttgtccattgattattaccagctgtttttactgcttcatttgacttattttgttttttcttattcttcactattatcaccccataatagtttgtctccaataaataaattaatactacatttctaacttattcataactttctaactacttattgttaaaaagtatgtagctaaatatttttaagcttataacattattgaaaataatatttatctaaaatttataactataaaactatcttaacatactctaaatttattttctttaccatcacgatcagctacaatactttcaatcgaatgttcaaccatatcactgactgcttgttctgtataaaaggccatatgtggagttaataaaacattgggcatatctcgtaatatagataattcatggtttccaatcactttatatttataatcattataatataatcctaattcattttcgattacatctaaagcacaggcagcgattttaccgctctctaacgcactaatcaaatcactggtatcgataatacttccacgagcggtattaattataatgacaccatccttcattttttcaatagtttcttgacaaacaagatgatacgtatcttctaaagccggaacatgaaatgttatgatatcgctcttagtaataatttcttccattgccacataatctgcatattttcttacttcttctttttcaaatgggtcataagcaagtatctgacagccaaaaccacttagatttttaatcactttttgacctatagcacctgttcctatcaccccaacaaccatattttcaagttctaatccaatactcccgtttaatgaataatcaaatccaattgctcgacgcatgatcattttcatttttcttaaagccattaacattatcattactgtataatttgcaacgctggcagtcgaataggttacattacttacgatcatcttattcgccttagctgctttcaagtcaatatgatcataaccaatagttcttgttgaaatatgttttacaccttgttcatgccaaatctcaataatttccttagtgattgctgtagtaataacacttaccccgttacaaccttttgctaaaactgcattttctttatttggtgaatcatatattttaattatttcaacacaataatgttgtgaaaacttttcaaaatattgtccctcatcaaattctcgataattatatactgcaattttcatgttttaccccctattatttacaactactatagtttagcacttgccttagaagatgtaaactctttgtcaactgtcactaggattaacatgaacattacaatgtttgactgttggaaaattattttcaatcaaatcatgcacttgatgagcaatagcgtgagcatgacgtaaattatcatttccatcaacttgtacttctaaatctacatatactttattaccaaataatcttgttttcaaatcatcaatattaattatttcactttgctccgtaattaaagaaatcaaatcctcttgaaattctctactacaggcatgatcaatcatttgatcaatcgcatcattaaaaatctcgatcgctacctttagaataaaaccacaaatgagaatactagcaattgcatctaaaatataatatcctaaataaaaaccaataacgccgactaaactgccaattgaagaaaaagcatcacttcgatgatgccaggcatctgctttcattgcatttgaattgatacgttttgcttcaataatcgtataccaatacatcgcttccttagccacaatcgatattacagctataacaatagctaacgatccatattttaatttaacattacttgggttaataatttctataataccgctatatcctatcaacaacgccgttaaaaacaacataactgcaagaataattgctgccacacattcaaaccgttcatgaccatatggatgttctaaatcactttctttactggataattttacgccaaccataactacaactgtacttaaaacatctgatgcagtatggataccatcggaaataattgcattagaaaaagatataaacccaattaagattttaaaaaatgttaaaattaaatttcctaataatgtaactgttgaaacacgcattaccgttttttgatactcttccatattatcacctaagttattatatgcaaaaaaagtaatctagtgacctagattactcatcattttccttaaattctttaataattgttttagtcgaacttgtcccaattcgttcaactcccaaatttataaattcattaaaagttttataatccctaatcccgcctgctgctttgactttacaaacaccatctacagtttctaacattattttcacatcttcaatcaaagctccacttgttccaaagccagtagaagtcttgataaaatccggtttaacttctttagcaatttgtgcacatttcctgatttcatcttttgttaaataacaattttcaaaaattactttactaatgattcctgcctcacggcaaatcttaacaattgtttccatctcttccttgatataagtaaaatcaccgtctttaactttagcaagatttaaaacataatcaatctcgtcagcaccatctttgattgcctcaatagtttcaaaagctttgactgctattgttgtttgacctaaaggaaaagaaatagctgcgccaacatggattgtggtgtcttttaataattctttacaaaatttagtatagtaagaatttattgcgaccatctttacctttaattcttttgcctcattacaaaaagcttgcatcgcttcttttgacgcatatggctttaataatgtatgatcaatatactgagtaatttcttctaatgttcgttgcatttatatcccgcctttctatttatcataattatactacaaaccctctattatgataacgtatttttatttaacaggataacgtattactgtttttaaattttcaggtttacattttcttggatcacttaaataaatttcatgatgtcggcggacttcattgagatcaatttgtaatccatgagtttcgataaattgatatattttttcaatactcgtattttcttcatcataactgcctagatgcataatttgaacacatttcccttcttcaataatttcgtaatttactttatcaagatttaagtatggtttttttacttttaataattctttagcatgttcaaaaacttcaagtgtaacaaattcaggtaatctaatcattgatttccaataaaatttacttttatcaccgattactttttcagttggttttttatccagccaccataagccttccaaagggggaactacatattcaaaatagccatctattttattatccgtcattttggacattttaattgtaaaagaaataccatataataattctagagcctctttatattcagctgatatattaggattacctttaccatcaactgttacatacgtgattttatctacattaatcaacattggggacctttttggtaaatataaatctttatattctttcttataatctaatttagtcatattaattcctccaatattttctcaaattttttaaccgataaaatttctcttgtaataaatttatgattataaaacaaactatatgtggtaaaaagaattcccgcattttttgcttcctcactactatttaatagttttaatttaattattaaacctttttcttgacaatacgcttcaatcatcggggcatatttagctgtaaaaggacactgatgactataatataaaactaatccaccttcctcacaggtcatttctttaatcgtaaaacttggttgaactgcttgagaatctaaacttaaatacattaattcatatttatctagactcattattgaaataaaaccatgcttaattaaaaatttataatccattacaaacggcattttcctttttgcagaaataacagttattccatgtttcttctgtttacaacaatcttcaatacaagcttccaacaattttttagctaatccctgtccttgatattttccagatacccaaagacaattaatatgcataagatcatcacctacgataggtacccaagcttcttcaagtggtaaatattcaataaaacactttccccttacatccatctttttaaaaatcaatccgcatttaaactgttcctcaagccaagcttttttagctttaacttggatatcattattactagaaattgcacaacaaatatgctccttctccaaattattttgatcgactgtgattatttccatttaactcatcctttctatagaatcattataacaaaacaaacttgacatcctctgtcaagtttgtttataaacagccttaattttattaatttctataattaccttatctttaaggtcttgaggttctattacctcaactttagacccaaatgagagaataaaactaatcaaccagtaatcatcagggacaacactacttactatataatttccagcagtatcctcacagattacaccatcaccgaattcatcaaaaacaacactccctatacttttatcaaattttaaaatcactttaatcctcggggtattcaaattaggaattttatttatttttggtggtaaagcaatttcttcaagttgaaaataatttgatgtcgttagtaattctataattcttgttagccgaaaaacacgatagctatttttttgaagacaatatccttgtaaataccaagtatttgctttaaaaaacagtttatttggaaaaacacatcgctgtgatttctcaccataagaattaatatatttaaatttaatttccttttgttcaaaaatagctttttttattgtttcaaacttttcattttgactattgttatgatgccaagtagtaaaatcaacttcaatccaatctagtttatttttattaaataacgctgccatcttatcaattaagcctgcttcatctctatcttgaagcctctctatacattgaagtgccattaaaatttgattctgttcatcatcactgaatgtcattttatccaaaacaaattcactatctatataaattccacccttagctccttgattggcataaattggaaatccagctacgatcaagcgatctaaatcacgatatattgtccgggttgaaacttcaaagtgttcagccaattctttagcagtagtctgcttatgttcgatcagataataaatagtttcaaatagtcgattaatggacatatttagtcgatccagccaaaatgtttacaggcattataaataccgtctttgtcacaatcatctgtaatatatgcagctttagctttcaaagcatcaattgcatttcccattgcgatactagtccattcatcagtaaacatactcaaatcatttttttcatcaccaaaaacaactacatcactataatccccatcaaaatgatcaaccatcattttgattccaactgacttatcgccaggttctacaaacaagtattcttgatgaaaacgacaccaaggcagttcctttaaagtttccagcttttcttcctctggagcataacaagccacatatactttataaattttatcaaagtcttttggatccaaaccttcttgaactatggtatccatatagatatcatgtgtaaaatcataaaagcgattatctggtgccaatcgtcttgtcgcattatcaggtgaaattgcccaaatatatcctttttccttacattcattaattaaattgatacatttatcgtaatctaagggtttaatttctactaatttattatgtattgtaattccatttccaccgtcacttaccatattttcaaaccctagttctttcatatgttctactgccatcgcataactccttccagtagcaatagcaacaaaatgaccagcctcttttaattttgaaatagctattttagtcgattctggtacatattgatttcctggtgtcccaactgccaaagtaccatcaatatcaaaaaagaaaaatttacgtttcattattaaaacctccaactgttttatcctatcatattttaatataattattttttatttactgaatatgaaaagataaaaatttactcatctgttagcttgtcgcttccattataattgccagtaatttcaatttcattaccatctggatctttgattgtaaaataccagtatggcatatggatattgacaaataacagttcagatacagcccctatctttaattttttaattcgttcatattcacttattaaatcctctacttcaaaattgaatataactgatgtatttattttatcactattttcatttttcaaagttgtcaaatatgaatgattataatggccacgataatcgttatttacaagaaaatcaatatcaaattgtcgattatataatgataatgaattcccacaatcaaatgtagcccaccgatcatcattacaatataatggctcttgctccaataaaagctgataaaaagccagtgacttagcaaaatcattgacactaatatatgttgttcctagcctcatttagtgttctcctctattttaaataaaaccatcttttttattaattctactggtaattcttgttcaaacataaattgcactgtatttttattatttgtcttataattagctaattctgttttaaaagcttctattgtttgcggtgatgtatagaagccgatatgttttttatatgctgcaaactggactagaaaaccgtcttgaaaatatgttggtacaccccatgaaattttttcttgagcttcaggcgccgtttctttaattatttttcttaacttaattaaatttatttgtatctgttggtaaaaactattaatatattcgtctactgttatagtcatcatcttctcctttatcttagaataactgaattgaaatatctctcttgaaactctgttaaggctctaatctgttcatcactataatcaacattatgaggaacaacaatcaatttatcatcattatcattagtccgctggataactgcaataactaccccacgatatctttctaccggctcaaagacaccaagcaaataagcatcaagttcttctccatctccgctaactgtgttttcaatgaaaccataattaagaggatatatgaagccgtattgaggatgctgagaacctaatggacgatcaatgagaacctctacttcttgatacaaataatctctacataacattggtaaaacctcctaactttaaaaattatatgttattttctgtatctacgcaatcgccataataaaaaaagatgcctaagcatctttatttaaccggaatcactgatccatcactatacgtattggtaataaaatctttaattttttgagattgtaatactgctactaaagctttgatttttttatcattttcatgtcccttttgacacgccacgatattaacatatggattactttcatctgctgattctaaaagaatcgcatctttagttggattcaagccagcatcaattgcataattcccattgattgcgattaatgcaccttcatcatttttatacgcattagttagcaattctggtttaatttccttgaattccaaatttaatcgattagtcttaatatcttcaatcgttgcatcttgcactttcactttatcatctaattcaatgatccctgcttcatctaaaatagctagaattcgtccatgatcagcaacagaattagaaataacaacaatatcatttttctttaattcattaatatttttaatttgttttgaataaaaaccaaatggttcaatatgcactccaccagcattaactagatcatatttattatccttaatatccttttcaaaaaatgggacatgttggaaaaagtttgcatctacatcactatcatttaaagagcgattaaaaatataatagtcatctaaaatttttatctctagatcaatatcataatcatcctttaaaatgttcttagcttcttccaaaatatcaccatgtggctttgaggttgcagccactaataatgttttatcatcacgttctgtttttccaccacatgcagttagtgtaactgctaataataaactaataattccgataaataattttttcataatatttccctaccttttatctattttccttacaaaataatcaccaataaattgaataataaaaacaataactaaaattaaaaatgtggctgtatacattacataattgttagttcttacaaacccatatagatatgccagattcccaagaccaccagctcctatggcacctgccattgctgtataaccaactaatgaaatggacataactgtaatcgaagaaatcaaagctggtttagcttctggaattaaaaccttagtaatgatttgaacattacttgcccccattgctttacttgcttcaatcgttccaccatcaacttcatttaaagcaatcatgaccatccgtccataaaatggtgcacttgataaaatcaatgacggtaatgctgccttagcacctaacattgaaccaaccaaaaatgtagtcaatggaattagcaaaaatactaaaataatatatggtaccgctctaaatacattaacgatcaaatttaaaattttattaacgatcaaattaggatacagtccatcatcttgagttaaatatatagcaattcccaagaccattccaagaattaccgcaaaaatcaatgaaatcaatgtcataaagagcgtttcatttagagctgctatcatcgcattgatatcaatgttttctaaaatacttcgcatctacatcacctccactttagctaaatatttttcaaataaagttattactttttcataatcaccgattacttgcaaaatcataatcccaaatgaactatcgatagtattgcttaaattagcttcaattacatttatatcactatcacattctctaattactttagtcaaaattggcaaacgactaacattttcatcaaacactactttcaataatcgtcctttagaataaattttctttagaacagtctcatcaaattcattatgattttttccttcttgaataaaacttttagttactgaatgttgcggcgaagtaaaaatctctttaacagttccttcttcgataacttttccttctgacataactgcaatatgattacagatcctttggactacttccatttgatgtgtgatcataatgatcgtaatatttaatttcttatttatttttaataataattctaaaatcgattttgtcgtatcgggatctaatgcactagtagcctcatcgcataataagattctaggatcattagcaagagctcgcgcgatccccacccgttgcttttgtccacctgataattcgctaggataagcattctcacgacctgttaaaccaactagctctactagttcttgaaccttttgctgacgaatccttttatctttattaccagcaatttctaaagctaattcaatattttcacttactgttcgtgaccacaataaattaaaatgctgaaaaatcattcctactttagttctcaattttcttaattctatttgtgataaattccctaaatcttgtccatcaataaatattttaccactatcttgtacctctaattggttaattagacgcactaatgtagatttaccagctccgctataaccaattattccataaatatcgccatcttcgatagttaaagaaacatcatctacagcaactacttcacgatcctttaatcgataaactttactaacgcgcttaatttcaatcataaaatcctccttaaaatataaaaactcgtcctttaagccaaaggacgagcattgcccgtgttaccaccttaattcattattacctcacagcaataacctcttcgagtacaatcatactctagtgcgctaacgggcacacccgtcataggctaaatatcgcctacaagactccaagaccatcttcattcattatcccctatccttttccaccatccaaggattctctataaagttcaagtgaactactcttcttttcattgtcgttggcaatatattaactaaatctattttaaaagtcaagagtattttttaattatttcctacttttttactatgcattattttcctgtcttttttatatctaaatttattcccgtttgtatcgacatttattcattttacttgattatctatcaatagttcatataattataaaaaaggagatgtttatgaaagagcttgaaaataaaattattgaatttgttcaaaaacgtggttgggatcaattagaacatcccgaatgtctaattaaaagtatttctattgaagctggggaattacttgaatgtattcagtgggataatgattacaaaacagaaaatattagtgaagaacttgccgatataatgatatattgttttcagctggcatactcactaaatcttgatgtaagtacaattattgaaaaaaaacttataaaaaatgctgaaaaatatcctgttaaagaattttaatctttagcaggtttttattttgcaaagttagcttgacatatattgcaaagcaaactatactttaattgtaaagtgtactttgcaaagataggagtgttataatgaaaactaaaattcctgaacttagaaaagcctataaaatttctcaagaagaactagcaaggtctgtcggggtaacccgacagacaattacttcaattgaagtaggcaaatacacagcttcattaattttagcttataaaattgcaaaatattttaacttgacaattgaagaaatatttgattttgaggaggaactaaataatggataaaagaattgttctagcacgtgaagacttgaaaaaaactaattactggatgattactttaatgatatctgctttaactttaatcatcttgtccttaactaatgttttaactattaattcaaataacgaacattacattgactttgtacatggatatcaaacaggactttcttttgctttatttgtttttccgtgcattaatctaatttctaacttctttttagctaaaaatgaagtaaagttaattgaaaaatatataaatgatcatgatgaacgtaaattatttattgctgacaaggttgggggaaatttttcttttacctttgagattattacaatggcattggtttctgtgattgccccactctacagttttgacttattgcttggaatcgtagcttgtattttcattatcattataatccgaggatgtttatatttatattataatcataaatattaattacaaaatgtaatatatatttgacatttattaaaatatacactactattatcttgaggtgatgagatggctaaaaatctaaggataaaagcagctcgagctgcactggatatgacccaaaaagatttagcagatgctgttggggtatcacgtcaaacaatgaatgcgattgaaaaaggagattataatccaacagttaaactttgtattaaaatttgtaaagttttaaataaatcgttggatgaattattttgggaggatattcttgatgaagaaatttaagtcattatttaaatgccgactcgatgaacgacaattgaaaattagaggaaatatctattttaagagtttttcagtattgagttttattattattgcaatattttttattaaagagatatttaatattgacctaatgattggtgattgggaatatttaattgctttgttcattagtattacttattgttttattttaatgatctactatgaaatatatcctctaacaaaggcccggtatcgtttattatttatattttttggtctttatgggtttggtttttttggtttatatctatttttaattatcaatagaaaacctttaatcatagacaatcaattatccgtattaggctgtgaactaattttcacttccttttacatcattatctttatcacctatgtaatcaaagtaatttataaccattatcatcaagatgatgataattaatggaggggaagaacatgttaaaagtagaaaacttaacaaagacatttaaaaaaattaatgctgttgaaaatgtatctttcgaagtcaacgctggagaaattatcggtctattaggagaaaatggagccggtaaaacaacaacattaagaatggtagcaacaatgttaaagccaactagcggtaacgcttatattgataattataatattattgataatcctagtaaaattagagaacatatcggtattttatttggtggtgatgttgctttatatgatcgtttatcaggacgagaaaatatgacatattttgctaaactaaacgggatgagtgatcaagaagctaaacaagcagttgatcaaattgctcaagatttagaaatggtagaatatattgatcgtcctgttggtaagtatagtcgggggatgaaacagaaagtatcattagcaagaagtatcattcatcatcctgatgttatgttatttgatgaaccaactacaggattagatgttttatcaagtaaattaattcatgactttatcttaaaatgtaagcaagaaaataaagctattgttttttctagtcataatatgtatgaaactgaaaaactatgtgatcgcgttatcataattcataaaggaaaaattgttgccagcggcacgattgaacaattaaaaaaggaatatcaacaagataatcttgaggatttatttattgaatgtattggaggtaatgatcatgaataatattatgacaattgtaaaaaaagaatttaaagatattttacgtgatcgtaaaacattactaatgactttcgttatcccaatcatagtcatgcccctattgtttacctttatcttttcatcaattggcgatatggcatcaccaagcgaagataataaatataaaattgttttagaaacaaataatccggaaatcactgctctttttaaagaagcgggtatttacgaacttgttaatagcaaagaccctattaacgaagcttatgatgggaaaatcgtagcttacatcatcgctaatgatattaatgaatcattaacacaaggaagtacacctgaagttgacctatattatgatacaacctcgcaacgtgcaatgactgctataagtactgttcaaacaatgttcagtacttatcaaaatagttatttagcatcatatttagaagcaaatcatttatcaagtaaagttttacaaccatttacttataatgaacatgctaaagacgaagaagctgatagtatgtccttaatgatgctaggaatgttaattcctatgatgatcattggttattctggttcaggaatcgtacctattgcaaccgatttaggtgctggtgaaaaagaacggggaactttagaaccattactttcaacaagtatttctagaagttctattttaattggtaaactgattgtcactgcaacttttggtagcattacttcaattttatcagcagtcggtttactgcttgcttttaaatttggaatgagtgatacgatggccatcactatcgatttatcacttcaaagcatgctgttaatcgtattattagcagtattatatgtaatctttatttctgcagtgatgttattagtttcaacatatgctcgttctttaaaagaagctaatacgtatttaactcctgtaacccttattccggtgttactttcagtaattacaatgtatatggagccaagttcagtttcaatggcgatgatgaatatcccaattctcaatgttgtaatcgttattaaagaaattatattcaatcaattaaattatgttcatctatatatgacaattggctggtcaatcgtttatgtaattgtttcaatgattgcagctaaaatgatgtatgaaaaagaagaggtaatctttagagcataaagagccgctgcagataaactgcagtggctcttttttaaataaaactatgttcaatttgcataaccgtatagtaattagggttaattgcacgtagtttcgtattgatttcttcttttaaaactttatgtttaatttcatcatttgaaggaatcataacgtcaaaaattaaatttgtatgtgttggtccagtaacaattctaaaatcgtgaatactgtattctttgttaattcctttgacaactcctaagactacttgttttaattcatttgttagagcatcatttgtgtctactggatccatatgaatcgttgtcaggatatgatatttctccaacattgaacgctcaatcaagtccatcgcatcatgaactgccataatattatcattacaatcaacttcaacatgcaaagttaaaaattttctacccggtccataatcgtgcatcattaaatcatggattcctaaagcttctggataagaaagaatatattcttcgatttcattaatcaattccttatcaggtgccatccccaataaaggatcaacagtatctttaaagatatcaattcctgcttttaaaacaataattgatacaacagctcccattatcccatctactggtaaatcagtataaagggataaaattaatgaaattaaagtcgctgatgtcgccatcacatcgtttaaactatcttgactggcagccattaaggtagcagaattaatatttttagaaaccgttcgattaaacattgccatccataatttaattaaaattgaaacaattaaaataactacagctacgattgtaaaagttactttttcaggagcaatgatcttaaaaatagaatcttttaaagcttgaaaaccaactaataaaattaaaaaagcgattattagaccagctacatattcaattctaccatgaccataaggatgctctgaatcaggatgacgattagctaatttaaaaccaaataatgaagctaaattactaccaacatctgaaaggttattcaacccatcagcctgaatggcaatactatgagtaatagcccccattgtaagtttaaaaattactaaaacaatattgcaggcaatcgaaacgattgaacaaagcatgccatactgttctcttactttagggttattataatcattataattcttaatgatttttttagatataaatttaaacattaatcaatatgataaatataaatgtcttgtttattaatctcgattaaattagcttctattagttcatctaggtatttagctacttttgcctgatttacctctttatttgccatcgctgccaaagtttgagcaattactggattatctatttttaacaaagcaatattttcttgattaaaaacaggctttcttaataatgtatctagtaaagcagcatatgctagttttgtttctaaacgaatatttccaaatttactgccttgaaataaagcttttggcagataataagtactatcatcgacactttctttcaatgcttttaatgtttccttgttgtataattccatatttttacctccaaatatattatccattataccataaatgattaatgattatgataataaattaaaaagattagatttttgctatctaatcctttaaacgccctgtaaatgtactaacatcctcaaagccgattttaattaaattttctttaacgtcattgacatactgaccaactcgatcacttgtatgactatctgtaccaatagtaataatacgacctcctaaatcataataacgttgaacttgttcaaaatttggaaagccgcaagtctgattaactgcatatccagaagtatttacctcaatccccttatttttaataatcaaatttttaaatatttcatcaattatattctgatatttcttatgttcaacttttttatcttcataaggcccgtatcgcataatgtaatctaaatgtcctaaaacattaaaacagtcaaaatttttaacgcaccttagcgtttcttcaaagaaagcctgatgagcttgctctttatttagatttttaaaaaaatccccataataaaattcagtatgatcaattacatgaattgagccaattacaaaatcaaaaggatactggttaatcaaattattaatctctaattgatgattcatatctagacctatttcaatgccccattttattataattttatctgcaaattctttttttaaagccataattgtttgataataaccttcgacatctagatcaaaaacatcaattgggtaatcgaaatcacgatgatcagtaaaacaaatctcatctagtcccattttaattgcttgaattacatgttcacgcggatcagcctcactatcacctgaaaatctagtgtgcatatgatagtcaatggaacgcattttaatagtctcctttagtatgaaaatctttcttatttccagttattttatgacgatcttttaacttattttcaatatcgtcaagtgttaccccttgattattcattaaaacaaaaacatgataaaataaatcactgatttcaccgattaattcttccttatcatcatttttagccgcgataatcgtttcacttgcttcttcacctacttttttacaaattttatcaacaccttgatctaataagtaattagtatatgatttttcaactgggttttgtttccgattttcaattagatttgatagacttctaaaaatattagtattatcataagccattatttcattaaagaaacaagagtacgctccagtgtgacatgctgctccaatttgttcaacaaaaattaacagtgtatctaaatcacaatctaaatacatccctttaatattttgaaaatgacctgatgtttcacctttatgccatagttcattcctacttcttgaaaaaaaacaagtttgatttgtttctaacattctttgatatgcttcttcgttgacataagctaacatcaaaacttcatttgttttatagtcctgaacaatagcaggaatcaactccatttttgtaaaatctggtttcattacattgctctccttacatttatatcatgtttccttaattctttacgaacatcttcaacagttgcttcgccaaaatgaaataatgaagccactaaagcggcatcacaattagtttgtttaaagacatcaacaatgtcttgaatactgccacaaccaccactggcaattactggaatatcaacagcattacatacagcattgatcatgtcgatatcataacctgctttagtcccatctgcatccattgaagtcaatagaatttccccagcacccaattcttcacatttagttacccattctattagatcaattccagtattttcacgaccaccttttacataaacgtcataaccgtcatcatcacgttttttagcatcgattgcaacgactacacactgtaccccaaattcatcagcagccgcttttattaaatcagggtttgcaatagctgccgaattaacagatactttatctgctccactagctaagatcgttcgaaaatcatcaagcgtccggattcccccgccaacagctagaggaatcgttaattcactagccccgcgttcaataatatctttaataatatcacgttcttcataacttgcagtaatatctaaaaatactacttcatcagcacattgctgatcataacgtttagctaattcaatgggatctccaacatctttcaattctacaaaattaattccttttacaactttaccattttttatatccaaacaaggtattatccgttttgtaagcatgtaataacctccttgagatctactttaccctcataataagccttaccaacaatacatgcataatagttcttactagctacatctttaatattttgagcatctttaatgccccctgaaacaacaaagttaatagtagaagttctagcgatctgttcatacatatcaaagttaggaccttgtaatgttccatctttactaatatctgtagcaacaatgtatttaacccctaacttctctaactctttgataaactccaagtatggcacgttactgatttttaaccagcctgaagttgaaacaaagccatctttaacatcaactcctacgacaattttttcaggaccataggtattaatagcactttttaaaaactctggatcattaattgcagcagttcctaaaattacccgatctattcctacttcatctaaatataaagcaactgtttcaatatttctaatccccccaccaagttctacttgcattgaagtattttgttttatttttttaattgtttcaagattaatacattcaccatctttagcaccatctaaatcaacaacatgaagcagcttagcacccattttctcaaaattctcagctaatttttctggttcattactatatactgttttttgattataatcacctttaaacaatctaacggcttgaccatcttttaaatctattgctggaataactaacattcgatcatctccttaaacgctaataatattttttgtcctacagctccacttttttcaggatggaactggcaaccaatcacattgtctttagccgcaattgccgttatatttgtcttaccataatcactataagcaattaattgttcatttgggcatgttgccataaaagaatgaacaaaatagacatcatcattttcatgaatattttttaaaattggatggttttggttgaaatgtaattgattccaacccatatgaggaaccttttcatcaatatccataaagactacttctccatccaggaaacctaatcctttagtttcttcaacttcataccctttttcaaataaaatttgcattcccaaacaaattcccaaaattggtattccagcatcttttcgttcatttaaaacatcaattaaatcaaacttttttaaattattcatagctaccggaaaagcccctactccaggtaatacaattgctttagcttggcgaataatatctttgtcacgagtaattacagcttcaattccgaccctttttaaagcggaaataacactacttaaattaccaatattgtagtcaatgattactaccatctaaatccccccttgatttttataagactccttttgatgaaacaactttatctttgttagcttcatcaatactaacagcttcttttaaagctcttcctaaacttttaaatatagcttcaacaatatgatgattattagttccatactgttcattaatatgtaaagtaatcagtgaattaaatgccaatgcccgaaaaaattcttccgtcatttctgtttcaaatgtgccaattctttcacaagttagattaacattataaactaagaaaggacgcccactaatatctaaattggttgttactagcgtttcatccatcggaatagtaaaagctccatatcttttaatcccgagtttattgccaagcgcttcttttaaacaagttcctaaagcaattccaagatcttctactgtatgatgagtatcaacttctaagtcaccttcgcatttaacgattaaatcaaaacctccatgaaaagcaaatagtgttaacatatgatcaaagaatccgattccagtactaatttcacttttaccttctccatctaaatctaattgcacaagaattttcgtttcttttgtttcacgttcaatctttccaattctcatgattattcctcctcaaatcttactgctactgaatttgcatgggcatctaaaccttcacttttagcaaatttaattacatcttccttgaattcgcctaagacatttttaggataatagctataagatgaatatttaacaaaatcatatacccctaatgccgaataaaacttagcagttcctccagttggtagtacatggttagttccactcatataatcgcctaatggttccggtgaatattctcctaagaaaatagaaccggcatttttaatttttggtaacatatttacaggattatctactaatacttctaaatgttctggtgctaaatagttggaaacatcaaatgcttcattcaaattatcaacaatgattgctccaccataattaaccaaggattcttcgataatatctcttcttgataaataagccatttggcgaactaattcaccatttactttagccactaaatcacgacttgtcgtaactaataaagcactagccagtttatcgtgttctgcctgactcattaaatcagcagcaatatatttaggattagcgttctcatctgcaattaccaatacctcacttgggcctgcaaccatatcaatatcaacaagtccataactaagttttttagccgtcgcaacgaaaatatttccaggacctacgattttatcggctttctttattgtttcagtaccatgagcaatggcagccaccccttgagcgccaccaaatttatagattgtatcgaccccacttacttttgctgcagcaataataatcggattaacttttccatcttcttttaccggtgtaataattactaaatctttaactcccgctaactttgctggaacagcattcattaatactgtagaaggataactagcggttcccccaggaacatataatgccacccgttcaattggacgcaccatctgtcccatgattaccccattatctttaaataaagaccatgatttatctatttgatttttatggaattcagtaatttgttctttagttctttcaaggatacgtagataatctgcatctatttgttttaatgcttcttctttttcagcctcaccaacaattaaatctttttcatcattaatttgataaccatcaaactttaaacaatactcatataatgcttcattaccacgcaaattaatatcatcaataatctttaatactgcttcatttacttctttattaacactttccttacggctatctaatttagttgctaccgcttctaaattaccttgataatcaattatttttaacattattttccctccgtaactgcttctaatttattaactaaattcataatttcatcttttttaaacttaaaactaactttgttggccactaatctagttgaaatatcactaattttttcaattacttctaagccatttgcttttaaagtcgaccccgtttctacaatatccacaattgcgtcactgattcccacgattggtcccaattctacagatccttctaatttaatgatttcaacatcttcttgttttgttgcaaaatatttttttgctactttagtatatttacttgcaatttttttacgccgttcaaatttcttgttacgatactctggataagccgctacagcaaagtaacatttacctatatttaaatccaataattcataataatcttcaaaatcaacatcgtctaatgtatctttaccaacaaaaccaatatcgacaattccgtgttctaagaaagttactacatcattggctttaccaaaaatcatttcaattccatcttttgttgcaattaataattcccgatccttattaaaaattggttccatatcaaatcccgcttcttgtaacaacttacagacctgcttttcaattctacctttagttattgctattttaatcattattgccttccccctgcttatcaatcgcttttaaaatatgattcatatggtagcaaaatccaattgcaccaacatttttattgaatcttggtaataagtcatcatatcttcccccagaaatgattggctgcgcacttttatcactatatcctttaatcattaagccagtgtagtatttcattgttggcaccattcctaaatcaaaaatgatactttctttattatccaaagagttatataactcttttaatctttccaaagcctttaacaatatttcatcatttattcctttgattgcagtatctaataaagtgatatcaccaaaagcagtcggcaattttaataatagttcatttaactgcccatcaaattcattatcggcaacaaactttttcatttcacttatatcccgatacttcaatatttctgttaattcaactgccttatcaccaaccagtgtgcataggcgattaaaaaaacgtgctgaaccaatttctacaagaatattttttaatccaagatgtggtaaagactcttgaatcatgtttaaacattctttatcaccagcaattccaggcttgttgatcaactcaactccaccttgaaaaaactcactggaacgtcctttatgcatagtttccttacggtatactttaccaaaataacaataacgtgcttcttcatcaccataattgtttgttgaatagaaacgtgctaatggaattgtaaaatcacagcgcattgcaacatttttaccttcatgattaatgtactgaaacattttttcttgttcaaaaccacaatctaattgagtatataagtcaacatactcaaatgatggcattaacacttcattatagttattctttgcaaagatagctcttaaactattttcaatctctcgtaatttcgatacattagtaataattgcgtcaatactttcttccggtattaaatacttaaattcttccattttatttccccctttagttacaaaaaaacgagtcattacactaatgactcgctaaagtaatattgtcattagatacacccaaataatatttaacacaaaatgggttgtatcaataaactgataaaaccctaggcaatccaatgatggtgatgtaattgtaaatttgttgttgttttcataattaacacctctcattgtatacaatatatcatatctaatgataaatgaaaagataaaattaattaaaattatagatttatcataaagtttatttatctaacttgttaaaatcttaaatttttatcttcaacattaccattgccatttataatcaaatatttaccaaaattcgtgagtattagcaaatattcgttaaatattagctaaaaaaggcgaaatattttagaaaaacatgaatcttattacctagtttactaaaagaaaataaataataacaattccccttttactaaaatcattgtctttatataatagtttttgtcattatttggaaggagaataatatgaaacaatactacatatatattttagaagaagatgaagaaatatctgctgaactgattgatcatttatcaaacaataataacatttggatagaagcagtcaataatcttcagtccacaaatcatagtgaagttaaacttgaacatgatattacaacaattctaaagcaggttggcattccggctcacttgaaaggctacatgtatttaagaactgctattttaatggtatactctgatatcgaattattaggtcaaataacaaaaagactttatccaaatattgctcgccaatacagtacgacagcctcaagagttgaaaaagcaattcgtcatgcaattgaaaacagttggaatcaaggtgacaaaagaaaaattaataccattattagggccgtcccagattctcttaaaggaaaaccaacaaattctgaatttattgctttaattgcagataaactcaaaataaaaaatcgttatgcatttgaaagcagataaaaagaagttttatatgaacttctttttataaattactcattatatattttatattctgacaacagtcgatcagttaccattgaaataaattctgaattacaaagtcgatgtttagctcgataaccaaacattttttctaactctacaagattaccgtttgaccaaataaccttgattatatgtcggattgattgttccacccgtgacgaagttgtagaatactctcttgctacacttgggtataattcttttgtaatttctgtcaaaatttcaatatcactgcatgaacgttttattgctgaaactaaataaccaaatccgtttaaatgatttggtgcacctatcgataaaaatatttcatatagtcgtttcattataaatatatttttatctctactattcttttctatcatttgatcctttggtaagatcacaatactaaattccctattcatttttaataacttagtgtctaatacacttatctcctcactttaaactttatcccatattgaatctgtttttgagcgcattaaagcccttattccgagataaccttgtacttcactaagaatttatatcttaatatattttttatatcaaaataattcattatactcactcccctctctttatcccaggattagtataacaaatttaggccctttaaaatataaaaattatgtgtattgatcaaatttagctaagcttttcacttagccgtaattgagatactatttttgagtatgatctcatctgcataaattgcatttgatatttttttataaatacttttattatcttcttttcttcatccattaacgaaagacctgttaatttcaaaattttcgaccattttttttcataatttttaactacataaaaagcattagaacgttcaatggttggatataccaacaaaaattcttcaagtctatgattataatatgaacgcaacaattcaatttgagttgttactagtaacattgacgaaggaaccatacattctacaaaaagcgcatgtgttctaccgcaatgtttacacatcactcgttgaatttgaatacatatttttcgcgtggatgttttataatacctttgataatagccaattttaactagtttaccattgctgccacagtcacattcaagccccttcatataaacccgtatcagtgcttgatcatatgtttcttgtgtgaattccttttttaaatatactgtatcatttgaaattataatcatttttagctctcccgtttatacttatatattacgcttaatcaggtaatcaaatcaataaatattttgctattatttgatatactaaagataaaaaactacgtcttactaaaccatttccattaaatacttatatatgaaatttagttcaaataacgtagttttattttatttagtttcttgaggcggaatataagtaactaattcttctatgttacactcaagataataacatagtttacaaataagatttgcatcgatcctttgaaaagaatttttgcaatatcgattaaaattaggtcgaggtatatctaattctttgcatattttatttttgcttattcctttattttttaaaatctgctctatattcattattatatgtccatattcattcattgaaatcacctctttgaaataagtataaataataaattgccttttagtaattatctatatagatatttgctatttagtaaggtattatattgatgtagctatttttcccaaaattaatacttataacaaagaaggagtaaaatttatgtatatgtatgatttttttaattcattagacttattacagcaggttcccaatattaatgatttaccaagaggtaactatctatattttggtatttgtaaaaaagatgaattaattcaaagaggttataaagttagctgtgacaaattgtatctaacctatgcaagatatgatgatttatctaatttatcatactatccaattgataagttctataactatatgaatcagctcacatcaaatctaattgatttaaatgagttagacaataatgaacttaaagctagcttatttgaagcaatatggcttataaatgagattgcatatttagaagaaattcctttttttaatgctaaattaaacattgaagtttctactttatgtgacatgatcgatcataatggtgatgaatttgatcacagcattgactattttgataatattggtttattgaaaaaaattcatattgctcaaattagatattttatttcacagtatcttcgtgctaaattgaaaattaataaaacttattcaaacattgatttagctaaatttgatagtttcgttttagattcaatgaatcgatttattgaagtcgctccaattaagtataaagttgaaatttatactaatctggataatcctgaatttgacagtatttttgaacaaatcgtagttttaaatgagcgacaaagtaacaaaacctagtcttctttatttctgaatatacgtcataaaaaaattcccttattagggaaacttgatttaattatactttttaaattatggctttaactataaatgctcctataacaacaattatcaaaaattgaaaaaatatactaattatatctatcactaacgaggatttaatcattttatgcaattctttcatcaatggtatctcatatttaaatgtaaataataagtttattagaactataattagatagaaaacaataagtgtagatttattaccataagagaaattccctgacaaatcagcatgaataatgactggtgattcaattgtttgccaatttagtaacaaggctatacctaaaagagcaataatgatccaagaaataatcttaataattttcttaatatttaccatagtttctctcctttacagcttttcaataagcgaattataactctttttcattaataatctctatttgacagctagcacatctaaatactttaattcgacagccttttatcaaatttaattttgctaaaataacctgctgtttatttggatgattaataatccaactatttttttcattatccggagtccaacaaatatcatttttccccgaataaatataaccaaggatcatctcgctagcacaatatggagatctcattgatactttctcaactttcataattatttaaataatcaatttaagtatacaattttttattcaaaaataaaaatgattagataaactaacagctattagttctaatcatctctattttgataccataaaattatcattaaaactaaaatattatatacatccagccacatgaaaatagcaatatttttttactaaaataaacttatctcataataaacattaacttattcaagctcgtatatatcatcaatatttatttttacaccgttttcaagcactaataaattttcatattcgttaattttttttaggtgatttataattgtaatgtattgtccacccgattttttttgatctgcttcaaaatatgttatttttattaacggtgcttcagtaagatgctttaataattgttgtaatctgaaattaataattgctatacgatcttcatccaagatttttctttgagctgttagtcgctcagtttccttaattgagtccttatgtcctgtcagtgcagcaaaaggagcaaattgagctgcacgatcttctaatgacatctgtggatgcttgattgaaatatgatgtggtaaattaataatatcttgatagtcatgaatgttttttgtcatgctttatgcccgcctattgttttattacgttctctccctgttgctccttctgctaagttcatcccttttaaaacagcattcttaccatatttcttttttaactccaaagttgttttttgaagtcttttttctttctctaaatcacgtctttgtttttcttcatctttcttttgttgatcataatcagtaaatagatccatttgttgtattgtcggctttattttaatactgctttcatcaataatatgattggcagaaatattaaaccttctaattgttaagaatcttttaacatgttcttcataccattttaaaactgccaagataattaattttgctgatgcagtataactatcaagattaattgttccatgggcatgctttggaatctttcgcccatatctatcggtaattatttcctcgcgataaagactacccgtagttacattttcaatatcatatccaatagtaataataatttggtttgtaacaagctttttatcaactaaacttaatgctaatgcgtccagcatttctttaagtatcaatttacctttttcgaatgaataaggtgaactcaaaacctgtccaattccaatgctattattttctggtttatatgccttaatatgttgcattgtacaaggttcacatccccaagcatgatcaatcagcaattcagcgttaataccaaatatactataaagaaggtcttcattataatattcatcttcactgcccactgaacatttggcaatatcgcccattgtaaataaacctattttctttaattttttttcataacctcgtcctattcgccaaaaatctgtaatcggctgatgatgccataaatattttcgatatcgcatttcatctagataggcaatccgaaccccatcttcatccgctttaacatgtttagcaacaatatccattgccacttttgcgaggtataggtttgttcctattcctgcagtagctgttatgccaatcgtttctagaatatctaatattatcattttagcaaattctccaggtgtttttcttgaagctttcaaataactagttgcatcaataaaaacttcgtcaatcgaatagacgtggagatcctcaggtgatacatatttcaaataaatgttatatattcgtgtactatattccatatacaaagccattctgggtgatgctgctatatagcttaattctaaataaggatttttctttagttgagaatcaaaataagatttatctataaaatttctgtcgttaattgctctttttctttgaaaattaacttctttgactttttgtatgacttcaaacaatcttgctcggcctgaaataccgtactgttttaaagatggtgataccgctaaacaaatcgtcttctctgttttactagtgtcagctacaacaagattagtagttaaaggatctagatttctttcaatacattcaactgaagcataaaaagattttaaatcaatcgccatatatacatgtcccgctgcttccattttaacactccatttctaaaaagaatccactgtttattctactatagtttgccctttttcacaaagaaaaatctattattatcaaataataaattttatttttaatcctcacgctaagtatacaaaaaataagtttattaacttattagctcactatattggaaactctctttatagcagctatgtatttattgatatacaaatagtattttaaaagacaatattataaagatggtatttttttatgcaatgtaataattatatttatttataatatttttttcttaaatgatttatttattatcagactaatagtattatattaaatatacaagaaggaggacaatataaaaatggattatattactaaagtatttaatcaagtaaaagaaaaaaatgctgatcaacctgaatttattcaagcagttgaagaagtattagaaagcttacgacctgtaatcgaagctcatcctgaatatgaaaaacaagctattcttgaaagattagtagaacctgaaagaactttaatgtttaaagtaccttggatggatgatgatggtcaagtacaagtaaaccgtggatatcgtgttcaattctcaagtgcaattggaccatataaagggggattaagattacatcctagtgtaaatcttggaattatcaaattcttaggatttgaacaaattttcaaaaatgcattaactacactacctatcggtggtggtaaaggtggatctgatttcgatccacaaggaaaatctgataacgaaattatgcgtttctgccaaagcttcatgactgaattatatcgtcatattggaccagacgtagatgtacctgctggggatattggtacaggtgcccgtgaaattggttatatgtatggtcaatatcgtcgtattcgtggtgcttttgaaaatggtgttttaactggtaagccattgccatatggaggaagtttaattcgtcccgaagcaactggatttggagcatgctactatggtaaagaagtattagaacatttcaatgattcttatgaaggaaaaacaattgcttgttctggatatggaaacgtagcatggggtgtttgtttaaaagctcgtgaatttggagctaaagtcgtatcaatttctggacgtgatggatatgtatatgatcctgaaggaattactacagatgaaaaaattgatttcttatgtaaaattcgtgaatcaaatgatgttaaactaaaagactatgctgaaaaattcggatgtgaattccacgctggtgaaaaaccttggggattaaaagtagatatggctttcccatgcgctacacaaaatgaaattggtatagaagaagctaaacaattaactgctaatggtgttaaatacattattgaaggtgctaatatgcctactacacctgaagcaatggaatactttattagtaacggtggaactctaggacctgcaaaagctgctaatgctggtggggttgcagtttctgcattagaaatggctcaaaactcaatgcgttataattggacacgtgaagaagttgatgctaaattaaaacaaattatgaaagacattcacgatcattcaaaagctgcggctgaaaaatacggtcttggatatgatcttgtaaaaggtgcaaacattgccggatttgaaaaagttgttgcagcaatgatttctcaaggaatttattaatagataagataaaagcgctaatcttcttgattaacgctttttttatattcttcgatattttccattacttcttcataaaatgactcagcatctaaaatataaagtgttgaaatacctttatgttttatcttaactttgtgtttgctcactaattttatttctttaacatctttatagtctatcaaagctggtaagattccaattcctttaaattcataaactagcatcgaatcattaaatatcttcatattatattttgttgttaacatcattaatacaacaaacgataagattacaccaataatcacttttgaacgattatgatctagtgcaaaataaacacacacaccgccaatcacaaagaaaaagataattgaaaaaattaacattctaaactctttatatttcatgaatccacctcttattaatattcaatagtatatcataatcaaaaataaaaacaacccaaaggttgctaatttcaaatggtgacctgtacgggattcgaacccgtgaatgcatgcgtgaaaggcatgtgagttaaccgtttctccaacaggccaaatcaatggtggttccggccggaatcgaaccagcgacacgaggattttcagtcctctgctctaccgactgagctacggaaccattggcggtctggacgggactcgaacccgcgacctccgccgtgacagggcggcattctaaccaactgaactaccagaccaatggttgcgggagaaggatttgaaccaacgaccttcgggttatgagcccgacgagctaccagactgctccatcccgcgatattttttgcattattttatttcggctgaattttaaattaaatggcgagggatgagggattcgaacccccgcgggacgttaatcccctgtcggttttcaagaccgatcccttcagccggacttgggtaatccctcgcattcttaaattggtggaccctgttggactcgaaccaacgaccgatcggttatgagccgatagctctaaccaactgagctaagggtccttgttgtttcttgacttacgggcaccgttattaaattggtagcggggaagggattcgaacccccgacccaccgggtatgaaccgattgctctagccaactgagctaccccgccgtaatcaactacagcaatgctataatttaataattaatggtggagcctagcgggatcgaaccgctgaccccctgcgtgcaaggcaggtgctctcccagctgagctaaggccccaattattattttaaatggtcgggaagacaggatttgaacctgcgaccccctggtcccaaaccaggtgcactaccaagctgtgctacttcccgttctatttctttttttactcaaatggcgcgctaggcaggaatcgaacccacaacctcttgatccgtagtcaagcactctatccagttgagctactagcgcatcgttcacttacaacgcctatctatattaacacatcttattagcttttgcaagatttatttatacttttttagacaacacgccatcaatgcccgaaataaaaacgaaccattgttcgttatgttttaaatggtggttccggccggaatcgaaccagcgacacgaggattttcagtcctctgctctaccgactgagctacggaaccattggcggtctggacgggactcgaacccgcgacctccgccgtgacagggcggcattctaaccaactgaactaccagaccaatggttgcgggagaaggatttgaaccaacgaccttcgggttatgagcccgacgagctaccagactgctccatcccgcgatattttttgcattattttatttcggctgaattttaaattaaatggcgagggatgagggattcgaacccccgcgggacgttaatcccctgtcggttttcaagaccgatcccttcagccggacttgggtaatccctcgcattcttaaattggtggaccctgttggactcgaaccaacgaccgatcggttatgagccgatagctctaaccaactgagctaagggtccttgttgtttcttgacttacgggcaccgttattaaattggtagcggggaagggattcgaacccccgacccaccgggtatgaaccgattgctctagccaactgagctaccccgccgtaatcaactacagcaatgctataatttaataattaatggtggagcctagcgggatcgaaccgctgaccccctgcgtgcaaggcaggtgctctcccagctgagctaaggccccaattattattttaaatggtcgggaagacaggatttgaacctgcgaccccctggtcccaaaccaggtgcactaccaagctgtgctacttcccgttctatttctttttttactcaaatggcgcgctaggcaggaatcgaacccacaacctcttgatccgtagtcaagcactctatccagttgagctactagcgcatcgttcacttacaacgcctatctatattaacacatcttattagcttttgcaagatttattcttttaagaaatggtgcccagggccggaatcgaaccggcacggattttaaggtccgcaggattttaagtcctgtgcgtctaccagtttcgccacctgggcaacacattaatggaggttccaaccggactcgaaccgatgataacagagttgcagtctgttgccttaccaacttggccatggaaccattaacttgttgttcttgtttttgtcagtcggtgtcatcaccagactgctcatttattatatgttaaacagaaaataatttcaagtattttttataaaaaaattaccattttcttatatataagaaaaaacacactaaaaaagattcattttatcaataatttttatatttatatttttaaaaaaactgctgatttttaatcaacagttttaactattttgctttcactttcgtccagcgagaattatacatctcttttacagcattatcctgataagcaaatacttcatcattcgggccagtgcgcagtccataagcactaatatctttaaactcctctttttcagcctgagccgctgcattaacatttgcagttaaatatcctacttcgacagtattcttataagatactttatcacttatcatataattaataaattcatttgcaagttttgtttgcttgcactctttcgaaataacaaatccatcaaaccagacattagtcccttctttcggcatatagtaacccatattaggattttccgacattactgctgctgcatcaccagaatacattatcgccatcgccttaacaccactgatcattgtatcaattgactcatcacctacataaaccggattcatttcttcacgttgctctaacagccactgataagcttcatttatttcacgttcttttgtagtattcattgaatatcctaaagctttgagagcaaccataaaactatcacgctctgaatcatacatataaatttgatttttgtattttgtgttccgtaagatactccatcctgcttctaaatctttttcatctacaacagttttatcatacaaaatacctacattaccacaaaaatatggtacccaataattattactcaaatcgaatgactgtcctaaaattccttcattaatattatccaaattaggaattaatgatttatcaacaggctgtaataaatcctctttgatcattcgttcaatcatatattctgaaggaactagtacatcataactatttccgctcatatatttagtgtacataatttcatttgaatcaaacgtttcataaataatccgacaatcgaacttatcttcaaaatcactaataactgttttatcaatatactctccccaattatacactcgtaacgttttacgactgacaccagtagaaattgaccacactacagataaaactagacaaacagcaataactatcttagcagttttactgcttaatagtttatttgtcgcttttggaaagaatttcggcactaatgttccaattgccacaaaaagtaatacaacgactaatataatagtcgcaagtgcataaatactaggattagttcgctttgacatattgtaaataacgatcgaaatattttcaattccattcccgctaacaaaataagaaataataaaatcatcaaatgacatagtaaaagccaataaagcccctgaaattattcccggtttgatctgagggataattacttttgtaagagcctgaaatggagttgcccccaaatccatcgcagcatcggctaaattaacatctaactgtcgtacctttggtaaaacatttgtaattacaaatggagtacaaaaagctacatgagctaataacatagttaaatagcccttttctactttaataaacgaaaacaacaacatcaaggatatcccggtaactatatcagggttcattattggtaaattatttacttgtaaaactaacttacgtaataatggttttgactttgatactccaattgctgtgattgttcccaaaactgttgaaataacggttgaaaggattgcgatactaactgacacaacaatagcatcgatcatttgttgatttacaaataactcttgataccagcgtaatgaaaaaccactccagcttgaaagtgatttagaatcattgaacgaaaaaattgccataatcacaagcggtaaatacaagaacgctaaagcaaaaccaatccataaactactattaaaattaaacttaaagttttttagttttttcacgtttagcctcctcttgataccccgcatatttttcaacccggttaataagtcccatgaggacaataactaaaacagctaaaattaaagaaacagcactaccaaaatgccaatcccctacattaataaattgctgttcaataaaattaccaattagagagtactgtccaccccctaacaattttggaattacaaatgaggaaatagctggtaaaaataccattgtaattcctgttaatactccacctaatgacaatctaaaagtaattttccaaaaagtagtaatcggattcgctcctagatcattgcttgcctcaactaaagatttatccattttagttaaagcggtatgaataggtaaaatcataaatggtaagaaatcataaaccattcctaaaacaacggcaaagtccgtatataaaaagctaacttcaccaaatcctagaaattggacaaaattactgatgattcccttactactcaatatattgatccacgcatatgttcgcatcaacatattgatccaagttggaaacgtaatcaataaaataagaagtgtctgcgttttttctttacaccttgaaattgcataagccactggatatccaattgccaagcataaaaccgttgtaattgcacctaaaacaaacgatttgactaatactgaaacaaaaattggatcaaaaaatttagaaaaattttctaatgtaaaattaaatgtagtaatcgtatttcctttttgaacaaaggcatagatcataattaaaagcattggtacaactgtcaaaacaaacagccaaaaacaatatgggccaaccaacttacgaaactgtttcattaatagctacccattttatccataacatgaatatcttcaggccaaaaatccaaattaacttttttccctacttcactaatatctgttgtgtgtaccatataatcacgatcttttgtctctacaataatctcgtaatgaacgcctttaaaaacaatagaagttacaaccccttctatttttcctttaccaacttcaacaatatctaaatcttctggtcgcaaaacaatatcaacatcttgaccatcatcaaaacctttatcaacacattcaaattgctttccatcaaattcaactaagtaatcttttacaaaaatcccttcaataatatttgattctcctataaattgagctacaaaacgattttcaggttcattataaatatcgattggtgttccaatttgttgaatttgtccctcattcataactacgatcgtatctgacatcgttagagcttcctcttgatcatgagtaacataaacaaaagtaattcctacttcctgctgaatattttttaattctatttgcatcgttttacgcatttttaaatccaaggctcccaaaggttcatccaataacaacactttaggctcatttactaaagctcgtgcaatcgctactcgctgctgctgtccacctgataactgatttatatttctttgtccaaagccagctaacccaactaaatcaagcatccgattaactttatgcttaattgtttctttgtccattttttttatttttaaaccaaaagcaatattatcaaaaacatccatatgaggaaataacgcatatttctgaaaaactgtatttagttctcttttatacggcggtaacccactaatatcttgaccatcaaataaaacagttccaccattagcttcttcaaaaccacccataattcttaaagttgtagtcttaccgcaaccacttggtccaagtaaagttacaaattctttttcattaatttctaaatgaataccttttaaaacaacttgaccattatattcttttgttagattgtctaattcaattaattttgtcataatgtctcctttaaaataatggtggtgttgaaacccaaataaccttagccttagtttccccaggattaaataaataatgcgatactaatcccttcaaatagaaagtttctccttttttcaacacaaattcattatcaccataaatcaacttaacccgtccttgaacaacatacccaaattcctgtccttcatgaggagcaattatcattgactgtttatctttttctaattcaattaaaattggttccatatcatttttttgagcgttaggaataatatatgaaattttataatcatcttgaatattttcaaaaaaatcatcttgtttaaaaactagttgttccgcttctttttcactaaagaactcttgcagattagttcccaaagcttctaaaatatcttctaaagtagcaaccgaaggtgatgtcaaatcccgttctaattgcgatagaaagccttttgttaattcactgcgattggctagttcttctaaagttaaaccattagcttgccgtaatctttttaccttactcccgatatccataagacacctccatcatttattcttttcaacagtctaattataacgaatcttgtcaataaagcaactatcatttaacaatttgtttaatatattatacttaatagcaaaaaaataataggcctagacctattatttctctaatttttcccgtcgtaacgaagatttaataaataaatcttttagtaatcgttcgtcattatcttttaaagccactttaattaagtctagttgttcttcaaatgcttcaattgaagccaacaaataatcactatttcgtaaaaataactctgaccataaattttcattaatatttgcaattcgagttaaatcacggtatgaatctcctatgtacttaccagtttcatatttttcattatcactattaatcaaagacactgcaattgcatgtggcaactgtgatgtaaatgaaataatttcatcatgagcttgtggcgacatgattttaacactcttaaaacctaaagttccaacaaaacgttccataaaactaatgcattctttttgattaaccggatgttcaatcagtatataattagcatttttaaaaacttctttactagcgtacccatatccttttttctctcgtccagccattggatgtccactaacaaattcaacttcaggatcaataattgtcattgcttcttctaagaaataagatttaatccctaccgcatcagtaatgatacttccttttttaaatttattctctttaataaattttaaaaccaatgaaggatataaacatataatagttaagtcagattgtgcaataatttcttttccatctgtaaatccctcaattatagttccttcatttttcgccatttgtaaagtcttttcatcgatatcaatcccataaacttcatgaccttgaccttttaaggctttaacaaaactgcctccaactactccgagacctactactgtaataatcataaagacctcctcgattatttaattatctggtcttaccttatatgtaatattattctcagtaaaagtaagctccataaaattataatatttcttacactttaaactaaaaatactgcaatcaatgacgttgcccctaaaagcaatgccataaaacaataacgaataaacaaagcgcttagtggcggtttctcttccttattgataaaatagaatgttaaaactactaacaaactagtcaataccccatgccctaaaataaaggcagttttagcatcatagtatttcattaataaaggaatgaaagctaaacttacagccaaaaaatctaaaactatataaatcactgttcgtaaatttatctttatccaccgaaaactaaaattttctttaaattcagtcatcttagattttttagttttttctttatgataaaaatcaaattcctttttttgtctttcaaccttacgatcaaatcttgccacttttattcctccattaactactttcttttttcttctaacatcttaattttataatctaacagtttttttgttaaatcaacatagtaatcatgagggtattctaagcggaacacttcatcccacaaacgtgctttttgttgattagaatattcacgaatttcttctacagtatattcggggtatacccgtttaccattaataaagactggtacttgtaactcttctacactgtatgtattagcagctattgtcttaaatttccaaatattcgattgatgatatattgttaaatcgtgactactggaaatctcttcatcatgaaaagcaattacatcaccaattgcttttcctgtttcattttcgaataagcgatatacttttttatatcctggattcgttattttttccgtattttcagaaattttgattttaggaataatttttccatttttttccagagccactaacttatatacaccaccaaaaactggcgcactccgtgaaacaataaggttttcacccaccccaaatgaatccagctgggctccttgatccaataaagaacgaatcaaatattcatctaatgaatttgatgctgttatcttagcatcaactaatcccgcaacatcaagcatcactcgcgctcgctttgataaataagcaatgtcaccactgtctaagcggatgccttttaattttttacctaacggcgctaaaacttcatttgctacttttatagcattaggcacaccactttttaatgtatcatatgtatcaactaataatacacaatcatccggatatgtaagagcatacgctttaaaagcttcaaattcactttcaaatgattgaacaaatgaatgagccattgttcctactacaggaatattaaacatcatccccgcagaaactgtagctgtcccggcaactccaccaatataagcagctcgagctccatatgtagcactatcatagccttgagctcgccttgccccaaattctaaaaccggtcgtccttttgcttctcgaacaatgcggttagcttttgtagcaatcaatgattgatggtttacagttaccaataataaagtttcaattaattgtgcttctataaattttgcacgaattgtaattaaaggttcattagggaaaaccggtgtaccttctttaaccgcatatattgaccccgtaaaatgaaaatctcgtaaataatcaaaaaattcttcatcaaacttatttagtgagcggagatatttaatatctccctcactaaaatgtaggtgttcgatacattcaatcaactgctgaagaccagcaaatattgagaatccaccattatctggatttttacgataatacatatcaaaatacacatattcatctttattgccttgtttaaaataattataagacattgttaattcatatagatccattaccaatgttaaattacgtttacttcctgcgtgtaaatccatctattgttctccttgtatatatttatcattataataaacttttttcttataaaaatctagttattttagaaatatagttcataagactgtcttggttgtggttgcggctgtggtaatggctgtggcttcattggtggcattttttcaaatagtactggaactaataattgttgcccaggatagatcatcattttatcatctaggctattcatatttttaatatagtcaactcgtgtattaaatcgtcgtgcaattgcataaacgttatcaccacgatttacagtatatagaaagatatcacctacctttggtgcaactgttggcattggtcgccgatcaaacaaattatccatgtaatcttcgtacatgtacatccctcctaccataacctattcaaataaaaaaataataaataggcaaaaaaacagacttcataaaaaagtccgttatcttgctaatttatttaatgcatctttagctgcctgttgctctgctcttttcttcgaagaacctactccaacccctaataccatctcatccattttaacagccatttcgaatactggattatttgacggtcctgatgatgagattagatcataagttaccgtctttctctgatcagcctgaatcaattcctgcaattttgttttaaaatctgtaatttcatcgtaattaacatcctcaacatgcttatagatcgtaatatccagcattttttcaacatattctggtccacagtcatgacatatcgcacccataaaagcttcaaaaatatcggctaaaacactatcacgatcacgcccaccattattcaactcacctgctcctaaataaataagcgggcctagatcaagttctctagcaaaacgtgctaatgattcttcacgaacaagttttgctctaagtttggttagacggccttctggcaattccgggtataaatcaaagatatgccgagaaacatgatactgtaaaaccgcatcacctaaaaactccaaccgttcataatcatgatttttcattttattttcatttgcatatgaaggatgcgtaaaagcttccttaaatatttctatattctgataaggtatttccattttttgtaaaaattgttctaattccacgttaattcaatccttctttcattttttccacaacgtcactagaaaccatttcaaaagctaagttaattgcattttcaaaagcaattgcatcacttgaaccatgggctttaataaccggtttaacaaaacccatcattaaagcaccacctgctgccttagtatcaaatttagtcaataactgttttaaagccggcttagcaagaaccgctcctgccttggttctagttgatgacataaaaccatcttttaaacttttaaccagcacttttgcaacaccttcaattgtctttaatgctacattacctgtaaagccatccgttacgacaacatcaacttcaccatccaaaatctctttaccttcaatattaccaacaaaattaatttcttgcatatcttctaacaatttatatgtttcttgatgaatctcatcacctttatgatgttcacttccaatatttaataaagcaattttagggttggtaatttttaaaacatttttagcataagcgttacccatgattgcaaatgatttcaactgttcagctgtattttctgaatttgccccaacgtcaagcattgctactttattatcactgtaagtaggcatcattgccatcaaacaagatttttcaacaccttcaatacgttttaaaaataacattgcacttgcataataggcaccagtatttccacaagataagactgcatcaacttcgcccttacgagccagcatcattgttttaaccatacttgattcctttttacgacgaatggctaaaatattttctgtcatttccagaacttctcgcgcatcgatcaaagtcacttgatcatatggttttaatgcttctaattcctcaatctttcccacaacatataattcatctgttttatttttctctaaaaatgatagacatgcttccacaactattctgcttcctaaatcaccactcatggcatcaattcctaatttcatctacttcacctcatattagtcataattataacataaattaatcaatatatttattattgttgattaattgttcttcgatttcttttattaattttaaatatattaaatcattagatttgctttcaagcagttctaatgcatcctttctagaaatttctaaaatattggcatcttcgaaaatatttccaacactaaacaccggtaatccactttgttgatttccaagtatatcccccggtccgcgcaattttaaatcatagtaagaaatttcaaaaccatcatgacaatttcttaaaaattctaaacgttcccatgcctcttgacttgaagaattacttaataaaaaacaatatccctgctgatcactacgaccaacacgaccacgcagctgatgaatctgactcaatccaaatcgctcagcattgtaaataacaatccaatttgcattacttacatctaccccaacctcaattacagttgttgaaactaagatttgaatctcattagctttaaatgctgccatgatctgatcctttgtttcatcgtccattttaccatgaagcagaccaatttgatactgttctttaaaataggccttcatcccattatatattcccgtagcatccctgctatcgatagcttcactttcttcaaccagagggcagacaacataacattgtcctccacttgctaaatactctttcaaacggtttaaaataggtttcatactatgtgtcttaaaaacttctgtaattactggttttcttccacttggcatcgttttaatagttgatacatccatatccccatatatacttatggccagtgttcgaggaatcggagttgctgacataaccataaaatctacttgtttacctttttcttttagtgctttacgttgatttactccaaaacgatgttgttcatctgtaataactaaaccaagtttttgataaattactttttcttgaaataacgcatgtgttccaaccacaatatcaatagtcccgttttctaaatcattatagattctttgtttttctttatttgataaatgtcctgttaacaaagcaatattgatatctatttttttaaataatttgattaatgaacgataatgctgagtagctaatatttctgttggcgccatcattgctccttgatatccagctaaataatttgcatataaaccaattgctccaaccactgttttaccacttccaacgtctccttgaacaaagcgatacatcattgtttctttttgtaaatcattaattacttccaacgctgcttgttcttgatcaaaagtcaattcaaaaggcaattgggcaataaactcatctagagtttggcgattaaattgcttttttattcccaaattatctttcctagataatttaatgtattgcatagttaattgaaaacgtaaaaattcctcatattttagataacgtaacgcctcttttacatcatcattattactaggaaaatgaattaaattcaatgctaattctttatggattaaatgatgtttaattaataaattagtaggaacctcgtcttgaatatgaccatgataaaaatttaatgccttttttacataaccttgaaaagacttttgagtaattccttcttttaatgagtatattggtgtaatcccactgatttcatcaagtggttttaatcgtaaatcactagcagtgatactttttgttttactattatatttaccaataatggtcaaaggcgtttctttagtcatattttttttcaaaaaatgacgattaaataaagttactttataaacctcctgcttatataatatttgaaaagataatctagataagcgccccttataaaatattttaggctcatcaattaaaacaccttcaataataactttttcgttatctattaaaggtgtttcttcaatcgattcataacgataagggaaatgtaaaacaagatcgcgaactgaatagatattcatattatttaataattcaatacgatttgtatttatttttaattgttgtaacggtatttgtttagtcatattatcaccacgaacattgtatattatttaaacaaaaatatctactattatacaaaaagcattaataaaacaactaagactccaatcccaattaaaattgataaagaattggctacagcagctacttctccttcatatttacactgtcttgtaaagactgcagatactgtactgatcggtgcagctaaagcaataattaaaatctttttagcaagcagcggcaatggtaataagaagaagcacaaagccattaataacatatttcctaaaagacggtatgataaaatagagattaaatccttgaagtcatcatgtgaaattttaatttctaataacagtccaatcatcagcattgctaaaaaaccatttccagcgccaataaaatcagtgattgataaaattggagctggtatttttattttaaataatgctaaaaagaaaataacaatatatacatcaaaaggaattgatgaaaataatttttttattacattgcttacggataacttctgttcactactaacaacacttgaagcaatcgcaaaggttccccctaatcccattaacgcatttccaacatcaaacatacataaataagctacacccattcctgggaaaaaagcttgaacaaacggtaaaacaaaattaccaatattgtagcccgaacaattgatcatatacgctgctcttgttggtgccgatttcccgttactaacaaaatacccaattgcaaccattaaaacgtttaaaataatccccattaaaattaaaacaatcatagcaccattgatcgtaattccattagcattagaaaaaagtgcacatggcaatgtaacattcataataattgttgccaaagtataaccgtcttccttttttaatattctaaattgttttaataaaaaaccgataactattacaattacaaaacctaaagcctttattaacacatcaaacatatttattcccctttttatatgataagacaatcataactactttttaaactttttttattcttttttcaaaatataaaaaaataagttattcaatcgaataacttatttattgatcatttcaattgcttgttctaaaacagcttgcccatccattttagaaaagttaacaccatcaattgaagcaaccggaatagaactattaacgatacctttaaccttttcaagatctccagcattttgaggagcaactaaaatacaatcagcatcagcccaagataagtcgattgcgctttcagcaactgcccaaatcatcacatctatgttcttttcttttgcatcttttttcattgcatttacaagcatactagtagttaaaccagatgcacagcatagcaaaattttatacataaatatacctccataaacatttatcatttacatatgaaacgattttatcacaatgaaattaaaattactacaattttcagaatttaaaaataaattttgacataaaacgattcactgtttattttatgaaaaaatatagtaaaatatcccctattttagttcaattgataaaattctttctaaatgtaaagctaaataaccaatttctgattgtggaatctcttttttcattacctttgataaacgaatacaaatttctttagaacgttcatatgcaaaaggaaatctttcttgggtaaaatcactaatatccatttgtaatttttcttcagtattaagacgtaataataaatatttaatgtgattcatcagtcgaatataagagattgaattacgatcaattccaatattcaattcttttcgtaatttatcaatactctcatgaattatttccattgcctgcatcgattcgccaacatgatcagtactaatggctgaatgaacatgtaatgttatataaccaacttcatcttcagttatttcgaaaccagtaattgaattgattaattgtttaccttttaatgccaccttatattcttctggaaatagtaattcaatatctttggtaaacggattagacatattaacattttcttggattcttttaattgcaaaatcaatatgatcggctaacggcaataaaatctttgtatctacgtgatcaaattgttcttgagcaaatctaattatatcggatgcgatttcaataaaaacgggatcaacattcctgataatctcgtgtggcaaccttttttcctgttcttttgtttccatcttatactttttaactccatcacttggaatataaatatcgtttatctttttaccaaaaccaatacccttacctaaaaaaataacttcctgattatctttacttgctaaaatactattattatttaacactttttctattcgatacatgattatcccttcccatcttatccgttttccttaagcagcaaaatcattttatgtttcacatgtttatcaccattataaacttactataatctaacttgatttatattactcttacctaattaaaccttatttagcttttctaaatattcttctaatttcatttttaggtttgatgccttaggccaaagaccagctggatatttaattcccgataaataattcctataacacctgatttctttagtatattttcatctatctttgcaagatcattaacaaacctattatttcaactatccaaatatttaaagttattctttccacccagtccttttacaatataataaaattgctgattaaaaccatctataactttactggctgttaaaacatcaaaatttttctcatcttgctgcaatagcaacttaccgttattactacgtcccaatgtttttaagttatattttagaattaaatatttaaaactactataatataaaagaaaataaataatccccactggaattattagcagccaatttgttttggcgttcccctgcaatatcccgaatataattaaatcaagttaatcctactgtaatattcaaaatatgtgcagcaagataagcactttccgccaaaatacttgcatcccaaataacattggtgccataaaaataaaagaaaattcaatcgattctgtgattcctgttaatatacacattaatgccgcagtcagcaatattctacataccaacttttttattgtgaatcggcacattgatatatcgctagagccacatcaggtagtccaaatatcataaatataaaccctcctgaaaaatagcgcgtagctgctacactaaaatggagtatgttaggatcagctagttgggcaaagaaaatattctgtccaccttgaactaataaaccatcaataagcatactcccgcctactgcagtttgccaaaatggtagacaaaatacatgatgcagtccaaagggaactaataaacgctttattacaccaaaaataaaagtccctaaatatccagtttcatttaccaaacttcccagtgtataaataatactttaaatctgcggccaaatcacatacattataattcccataataataaaaatcgaaagaatcggtgtgaattttaatttttcaatacaggatacacatttagaaagcttagttcggtaaaaaaatgattatgcaagtacgctaccgtcgttccaacaactattccgccaaaaatttccatttctaaagtcggaattacgcatattaccgtaatcgtaccctttaaaacattattactatcgaattatcagctaagatttgaccgttaattaccaataacacattaattaatgcatacattacaaagaaagcaatcaccgacgataaaaccgtaactgctctttctctttttgccattcccaaagccattccagctgcaaaaataaaagatagattatcaatgattcctaaacccgcttttttcattataacaagtagagcatttattatcgtcacctcgcctaaaatcttctacaaattatatgaagtgatcattgtttcatttgcaaaagcaattgctaatcctaacaccaatctcgtaactggtagaactgctattgataacataaaacttcgttcgattctttgtaacagcgcaaaaattcgctcttttattctttcctccgaatccaacgaaacccactttctctatggtatcattgaaagtgctttcggtcaataaattgtattgaatcaaaaacattttttacattctaaaaacacacgaatctaatcgtgtgtttttatcctcacagcattaattgtgtttttttcttttacctgctaatgctaatgcacctcctgtaagacctaataaaacagcatagcctatagtttcaatgctatctccagttttaggactagtgccttcattatccgttattttaattttaacaagtgcattcaatgcctcatttaatttagcagctgctatgtcaaccatatcttgcgttgcatttttatcatcatatacagctctaccgttttctaaagcaattactaaaccctgataagaatctttagtatactcagattctttgattaattctgctttttttatagcttctaataataactctttatttatatttacttcaatatttacattaggaatatcgaatcctgtttgtgatgttgtattagtagaagttaatgtattttgatatagcagatagaaagcggaagcactccagctaaaattcttagtatgtagcccttctcccgtttcagggttataattttcatggattggtcctgttcctaacaagcctttagcatgatcaaataatttcgttgttgccactttcgcttcatcataatagccgtaattttgtaaagcttctaccgcatatagagcttgatctagccataccggtccacgccaatatttttctggtgcatatttattattatcttttgaagctgttgggaaaggtacaaatgtatcaaacttattagcatctgtcatactttctacaactcgtgcagctttatctttagtcgctgctttagcccatagtgggatccatccttcagttcctttaccccgattcactaataatttcttttctgaaccatcttcatttgtttgaacatcataatagaatccagtttcttcatcatacattctatcattaatatattcttgaatatattgtgcctcttgtgtatattttactacatcattttgataccccaattcttctgccattgatttcaagaaacctttttcagcatataaataagcatttaaatccactgattcttgattaataacatatccaattggcgcatgttgattatttcttactgtataaatttcaatgcctttatcatctgccccgtttccttcacggtcaaaacgtgttgcattatccattccactttcccaagcagccgcttcaattccagcttctgggcatacaatacgttccccattatcatctaaaatataaccgtcttcattaactgtaccaaacccttcaacatactgaccaactgtatattcataattacgccaatcataacatgtttcatgcaccattccaccatattcagcaataccatttttatcaatatcacgatttgtataccaccagttatgataagcagctaatttgggatacatttcttttaaaaactctttatcaccagtttgacgataaacattttcaactgcccatgctgctaaagctggtttagaatttcgttcattccagttaccgccatcaccaccgcgatcttcattttgattatagaaaatacagtcaatgatagctcctgcatcttgagggcgtactgcatcatcacttttaatttgataatcaaataaagcacgaacattatctttagctaattcttcattaaaatatgttgtagctactacttgtttccaagaatcccatgcccacataccgatgaaccatttatatgacattgatggaacgattccatcatgtttgattgctccagcagcagaaaaccagttagtcatcaatgtttctattgattttactgcagcccgttgataattaacattagcatctactccattttcaaaaatagtatctacatatccttgccaacgagaattattttcctcgaaatatttttgaggattttttaataaattagttactttagttttttctgaaactctttcttcatttgtgaaagtaaaactttgtgtttgataagtattatattcgctatcagctccaatcgttattgattcatttttggtaattgtatatgataaccgatcatcacttaccgttgttttaatatcatcttcacttaatactacatcaaatgagttttcagttgttgtcatatattcccaagtgcctcttttttcaatgaagttaactttcaccccatctgcactttcactcaaagtagttcccatacttttattttcactagtataccaagtaaataaatgtccatcccaagataaatttaattttaaatcatcattagttttattaattatttttgtttcgatcaaagcacttcggttagtaccaaaaattaattttaattttaatgttaactcagccaaatcataagtttgttcaagacgacctggataatatacctcattagtagtcgctttagttaaatcaattttttcatttccttgtgctgttactttttctaaattaattttattaattgaatcagataaattaattggatattcttctgcaatgattactggtccagcaaatcccccatatagatctgttgctgttttttgatgtagatagtaaccatgccaagctcccatatctgaaaagttattatattcatttgtactatatgtcccgtagattttttcttttggatcggcagttacatctaaaacatttccaaaatcagtaaggggttttgtattctcagctgctcttgtaatcgttattgtagagcccaacatcatgcatgacaatcctaaaatcagtccttttttcatgatacctctttttttcattctcatcgattttctcctccatataaaactgtaaaaagatgtatgctataggataaagatgaacgcgcgctttttcatcaaaaaaggcatcaacatatactaaaaaaatatataaagataaaaaatatcttaatataaatctagtatagttgatgcctgcattaccagttacacactatttcaatttttacaaactaaatactatcattgtaaacggttactgtcaacccttttagtgaaaattgtttttatcccaaaacatttccttgtttttaaaataatcatcacctcgacaaaatatactgcgtccaactattttgccaaaacatttggcactctttttagcaacttcaaaactcattggtgcaaaatactgttcatcgattctttcatctgggcaataatccaagagattcccctcaaaataaatattgtctttaaaaatagtaagtagatcatcgggtttataataatatcccggggcactgaatttaaaaccgatttggcttaacacatggataacaaattcaacacatgtatatgattgatatgtagcaaatccctttgttactgggtaagtaagaaccgaaaaaaggttatataaatattcttcattaccatacaactccccaataatctcattagctaatttatattgttctaaactaaccggaatttttataattgcaacatcaacaaatgtttcttttcttaatgtatagcgaggaattgtttcaaggacaatcccggctaaaaataatgaattatgctgtagacgagcaaatgaatataacgcttgaagattttcatctaatgcgatggcactatgattatagcgaatccttccaacttttctaatcatgtaaccaaatcttgttggtgttttggaaaccattaaatataaattttttgttttatccatcgttagattcccttcaatattttttatcttaatattataaccataccatatattttaaatatcgacaaattttgttcaattttagaaaaaatacaagtcccgttaaggacttgtatttaaagtaattcttctacttctttatatttaccattaagtgcttgagctaccggcttacaagtaaaatatcctttataagtatttaatcctttcataaatccagcgtcttctttaagcgcctctatacctttgtcggcaagttttaaaatatatggtaaagttgcatttgatagagcaatagttgaagttcttggtactgctccaggcatattagccactgaataatgtaatactccatgttttataaaaacaggatcatcatgagtagtgatatgatcacaagtttcaatacacccaccttggtcaattgcaacatcgacaatcgcactaccttctttcattgttttaaccatatcttcggttactaatttaggggctttagctccgggaattaataccgctccaattactagatcagctgtttttagagcttgtcgcaaattatattcattattataaatcgtatgaataaccccattactaatatcatcgatatatgccatacgttctgcattaatatcaaaaactcttacgctagcacctaacccacaagcgattttagcagcatttaaaccgacttttccaccaccgataaccacaactttagccggcattactccaggtacgccacctaataaaaggccactgccgccatttgctttttgtagcatgttagcccctatttggactgccatacgtccagccacttcactcattggggttaaaagtggcaaattatgatttaattcaacggtttcataagcaattgcagttgtttttgaatcaatcaatgcttgtgcaaacggttgatcatttgcaatatgtaaataagtaaatatcatttgatcttcgcgtaaatatttgtattcactttctagatattcttttaccttaatgatcaaatctgctttagcaaaaacttcatcacaactacagattattgctccggcttctttatattcatcgtcattaaaaccactgccagttcctgccattgtttcaacatatacttgatgtccggccttgcataaggcaaatactccagccggcgtcattgatactctattctcgttattttttatttctttaggaattccaataatcatattctaataccttctttcattaagcttactattttcaaaataagtttagtactattatatcgcatctttagctattaaacaaaatttttttaatctctattatctttttctttatgaacttagtaaaaagaaattaatcaatgataatttagactagtatcgtcaatctcttaataattttctataacttctttatttccttagaaataaaatcaataaattttgtaacagttaaactaaatgactgatattttttccagacaaataatgaatgtgaatttaaacttggatagagaggtctaaagcatagttcgtcacttgccgcatcacaaattgacccttcaaccactacggcataacctacatcatttttcactaatattgccgccgtagtcgttaaatcagaagttgcacaaaatgatagattttcatatcctgttccgtaccagttggaaaatatagtctgcgcttcactacgcgctgaagcaattaaaggtaaatctattagatctttagatgttatatattctttttttgccagtgaagcattctttttcattaatattccccatttttcttcagcgttaaaatgaataaaatttaatttttcaagctcaaccggctctaaaacaactccaatatcaagcaagccattatcaatattttctaaaataaaatcactatttccgtttcttattcgaaaagatacatagggatatatttctgaaaatttttttattaattttcccattgtctgagtagcttctgtaactccacagcctattgctatttctccactgatatcatgactttgactgccaacttctaattccgctttttcagataaaataataatttcctcggctcgtcttttcaaaaccattccctcttcagtcaagaccatcttgcgttttccacgaataaaaaggacggcacctagttcatcttctaactgcattaattgcctgcttaaagtaggctgagtaatatgcaataattctgctgcacgagtgatatttccttctcttgctactgtcaaaaaatatttcaatactcttatttccattttttcaccttcttaatagtcgtttataattatgataaaataaaacctaaataataatgaggtagttagcaaaaaacaatcaatataccaatttcaatcacttatatcaatattatataggttttcatttatttatactattaattaaataactttaaattgacgccatttaccttttataaatcttattacaaaacaaactgaacgacataaccagtcagaccccattgcaatccatacaccaataattcctagattaaagataattccaaataacacggctgcacctagtctaaataagatcatcgatacaattccaacaaccattgaaaatttaacatcaccagcagcccgtaatccatttggtaaaacaaaagcagttggatgtaatgctgttgccatgatattatgcataataactaaaataaaagttaaatttcttgcttcacttgataaagaatatagattcaagatccacggcaataacaatataacagcactgccaatgattcctgtgacaatataggatattttcattaatttttttatatagtattttgcctgctcataatcattggctccaatacattgtcctacaacaactacaatacccaaattaattgcatttacaacaacaactgcaatttgatcaatacttccagcaacgctattagcagcaatttgacttgtcccaaataaagcaacaatactcgttactaacacccgaccaagcgtaaataatccattttcaattccattaggtactgcaatttttaaaattctactaatcatttcttgattccatgcaaatacgtttttaatctttacataaactaaattagatgagtttagtgataatgcgaacataataatcgctgcaacaatccttgatatcaatgttggtacagctacccctgctactccagcatgtaaaataaataccccaatataatttccaacaacattaataatattcattaagattgatacatacatcgtagttcttgttttttccattgatctatataatgccgctgctgaattatacacacctaaaaatggaaaagaaatagctgaaattagaaaatacgtcgttgctgctttcataacatccatttcaatcgcaccaaaaaatgtactaaggagtatacgatgaaatacgagacaccccagcataattacagtagcaattactattgtaatcgtcaaaagctgactagatgctttgttagcattctttcgatctttatttccaatatattgtgaaacaattatcgctccaccagcatcaatagcagctagtacagtaatgattaaattattgaacatatctactaatccaacacctgaaatagccacctcacctgcataagataccattacagtatcagctactcctactgccatgattaaaatttgttcaatgatcagtggtaaaattagtttttttaatgccttattagaaaacattgtttctacctccctttttctttacaaaaacattgtatattaggaatattataatgtctaatacctatcatctatcagtatgatacctttaaagcattataaatagcaaaactagtaaatattatctttgatacctttaatcttctttatcccatattcaataaaataaaccatgcaataactgttatctttttattaaaaaaactaaatataaatttttgtaatgatttttgacactatctgtatattaattttttctttatacttttttaatgtcaaataattgacgtattcatagaaaagtaaatataaaaataaggagaaaagcaaattatgaagacaaaaaaatttaaagaaatatcaaatgaatggattgagttaaaaaagctatcagtaaaatatccgacaattgctaaatatagagtcgttattgacacacagttagcccatcaattcaatgattatacgatggaacagtttaatgaagatattatcattgcctattttaataaactgtctactaaagaaaactatgccaatagtacccttctaagtattcgatatgtattaagagccattattaattattctcatcaaaaatataaaactaataattgtagttttgagctaattaaaattgccaagaaacaaagacaaattaatacgttgtctaattctcaaaaaatcaatttatctaactactgctttaataattttcaaccaatctctatagctgttgccatttctttatataccggtcttcggattggtgaaatttgtgctttaaaatgggaagatattaattttgaagacaactatatttatgtatataaaacagttgaacgtttaaaaagcaaggagaacaccggtaataaaactgcactcatgatacttaaccctaaaaccagttcatctaaaagaattgttcctattccattatttcttaatgaattcttagttaattataaaagtcgatatcaaatcgaagataataatgtttttatcattaccggcaataataaaatacctgatcccagaacaactcagtatcgttttaacaaattatgtaaacagtttgattttaatactaacttccatactcttcgccattcttatgctactaattgcgttatgaacgaagtggatactaaatcacttagtgaaatgcttggtcattcaaatgtaggaaccacgcttaatctttatgtacattcaagtttagaatttaaaaagaaacaaattaataaaatttccagactataattttttataaataattttattttaaaacaggttaaaaataaaatttaattactttatttcagcctgtttttattaaattattggaaataagaaattagttgtggcttctttatgagaatcttttatgcataagaaataaattttatgatctagcgtttaatagtaagtgccctattctacactcaattcaaatacaaaaaaactctacgataaaaatcgtagagccaaaccaatttataataataaaaaaacttaatttatatactagtccataaaaacagtctttatgttaccactcaaaatttacaatttaagtagaatatatcattttttataatttctgattaatccctgttatatccatgatagtgatcattatctataatattataacttatttgaatttcaaacataacttttaaaaaggcactaaatgtaatcacttagtatcttatcatttaactcacttttatttacaagatatttattataaatttatatattaaaacagtaatatttcacataatgtgtttaaaacaataaagacactccaatatttatcacattccttactaacttattttaaaaacattactattcattctaaaatctaattttgcatgatatttaataatcactttgattctcaaggattatgcaaagaatatatatgaattattgaatatttatatacatatacttcggttaatgacaaattaccccaatatcaaattttttcttatcttttactcttattcacttatttatattataaaacgctatatttatgtaatgtcaccaaaaagttagacatattaaattaaaactgaatcttgaaaaggtctgtagtctacatgcaagcgaactcaatccttttctttttgtattaattttctcattattataatactcgatatatttaataattgcagctttgaattgttcatgcaattttctttatgagaatgtaattacttgatttctttatcacttaaccatttttgataggttttatgctgacaatgtcattcttgatctaaatgaaagattaatccttttgagattaaataataattgcaaactaagatgttgagttttttattaatacatcgccttatactggcagttaaagctactaaccgataattttttctgtttccaactctatttatcagttccattttttcgatggataaagtcagcttattatgttctaatcttattctactcgtcgagtcaaaaattcttatgacatacactcgatagattttttagatattcccatccttatatttttaaatatattctaatttaaattttttactatcccatataaaaagtgacctccttttaggggtcactacaatacattattttttaatttctctttattattctacaccaattttataaccattgccctagaattgaatgatttctattttcgttgataaatactaactattttgaacattactgttccctgttattcactgcatttgagtagtttttggaattttaagctccaaataaaccccaaaaactgaaatcagccatattttcttatcacttattttcacttgcccaaagtttttttatagaaagcggataattgatataggcacgtttaccactcataaaaaatacaactttcttttcctttatcaatcttcttacaacatactcttttatattcgttatttcagcaaactcctttatagtcattatttggaatgtcaacactttattagacaaaataaataagaattacatatttttatattcaattggacttctatatccaagtgaactatgcaatctaatatgattataccaatgaatataatcatacaattctaagtttaattcatttaagcttttgaattccctattaaacgaaaactctgtttttattattttatacgttgattcagcaacagcgttatcaaaagggcatcctttatgacttaatgatctagttatgttatatttatctaacatattttcaatcaaatcgtttttaaattcatggccgcgatcggtatgaaacattgttattttatgcatattttctttaattgaatcaaaggtattttttactaattgagcatctttattagcacccgttgaatagccaatgatttctctattgtataaatcaatcattaagcatatataattccatttacctgctacttttacatatgttaaatcacttacaattacttctaatggccttttattattaaattcccgatttaattcgttattaattttgtcttcgttaacttttgtgtgaataactttataatgtttctttgtataattagatactaatccattatttttcataattcttgcgattcttctacgactaacggtaatatttactttacttagttattgctttatacgtcttgtaccgtaattttttcgactatttttgaatgattctacaatcaatagttctacttgactatcatcaattctactttttatttcgttgttttttctatagtataatgacgacctggcgacttttaatagtttacacatagcactgataggatatttattttggtttttcaatataatacttattttcgtgccataatcagcgctgcttgctttaaaatatcattttccatcattaaacgtttgttttctttacgtaatttaattaattcatttctcggtttgccgttattgtacaattgaaccatttgttttttaaactcttcatcaaatactcttctttttcttgacatgtgttatacctcttcttattttatttgacaatataatatcaattcttaatttatttgtctaatatagtataaccgttccatagatgatacttcaatgcaaataactgaaagtttgctacgtaccctaattgaagtcaacaaatcaaaataaaaagaagattgactttgtgaataaatttttcattcacatttcaatcttcttttttcaaaaatttataaccaaaaccatatacagttataatatatttaggatttttgtagtcatcttcaatttttttctaagtctagaaatcatattctctattgaatttacgcaattattacttggttcattccaaatttcttcatatatctgttctctcgaaaatactctacctatatgactggctaaaagatatagtatctgatattcctttgaagtcaaatatatcttattaccatttttataaacagacttattaaaagatttaatttgtaatccattaacttcaatactcttactatcaaaagaaagaataccaccgttatttttcaccaacgatatcacttgattgaatagttgttcatttgtgtctgtcacttctaatatcacaatttttttatctacattataaatcaatttatttcactcattaaataataaataaattcaacttacaagctttcaaaatcttttaaacttacaggttcgcaccattcatttgaattattgtcacttggtacctctattgctagatgactaaaccaactattcacactagctccatgccaatgtttaacttcagctgggatatgcacaacatctccagcttttaaactttgtgcattttttccaaattcctgataccatcctttaccacctatgactagaagaatttgtcctccaccatgatgaatatgccaattggttctgcaagctggttcgaatgtcacattaccaattgaaacaccttcagttgacaacatattaagataactttgtccaacaaaatatcttgcataactagaattttcatttcctatttcaaataatacaccattcaagtctttaatcatttctcccctattcacttacagcccctccttattccttaaattttatctttaaaaatttgcatgattatttatattcctttaaaaacgcttcaacatcattcccatttttccttgctggaaaacaactttcttttgtatcaagagttttgattaaattcatatcttcatcactaatattaaaatcaaaaatatctaaattttctgtcattcgttcaaaattagtcgttttagctacagaaacaatttttctttgcgctaaccatcttaaaacaatttgtgccacagatttgttgtatttttgagctagtgaaattagcaaaggattttcaaataattttccttttcctgctgctaaaggtgaccatgcttccatttgaatgtttttatctaacatatattcatgatcttcatggcgttgatataaagcatttacttcaacaagatttacagcaggtatgattttattaaaagttacaaaatcagccaacctttcttgagtaaaattatcaacaccaattgcctttaccttaccttccttatataattcctcaagtgctctccatgctccataataatcattatatggttggtgaattaaatataagtcgacatagtctaatcctaagttatctaatgaagtttgaagtgccttttttgcaccgtcataattcgtgtcagttacccataactttgttgtaacaaataattcttctcttgcaataccacttttttttatagctttacctaccgctttttcattaccataagcacttgcagtatcgatatgtctatatccagcttttaaggcatttaaaacgatttcctcacattccttttcatctgtaattctaaaaacaccaaatcctaatataggcatattgataccattatttaatgttatatattccatatttttatttctcctttatacaattctaataaacatttatatgagctttgatgatttcgcctataaatatttcgtgaaaatcatggtttgaatacattactttttcaatatccttatcaaataaatatttctctttaatttgatcttgataaattttgtgacataccatcacttgttctgcttctttaaaatatgtatatccaacttcaaatataggatggatatcatccttctaacaatctgataggattattcattagtatttgtaaacattcttccttaacacctgaatccaacaaacaccctaatgcttgataaaattgttcagaaatagcaggtgtccaatcaaagaaatgatcagatgataagatacaatgttcagccccaatttcttcaatggcttttttaatatctaaaatatctaaagaatgatggagaggtgctagattcaaggtacaaaattctacataatgacctagatgtgcgaactccttcatttgttcaaaatcattgtatgagcaatcactacatggatgggtcaatacaagcttatgataacctatcatatctgcatattttcccactgctagactttcttcatgactgatatgccctgtgcataatacaatgttatgctttttacacatttcaataattattttaatatcttctaataattcaccagtattatttaataaatagtaataatctgaatcaactagattttttgttaatggtagatattctttggcgattgttccaaagcctgtgtgcatatgatcgcttaaagcactccatgttggtaaccaaataactttaacacccatttcaattgccatttcgactacccaaggatatggacctccagcaactctatttaatgaaatgcttggatatattttaaaattaggatattgtttgtttaactgatgagctaaagctacactaggccatccatgtgtttttaaaacaataccattcataccagcgtttatacattgattaataatatcatcattactttttgtttgtggatgttttaaacaaatatcaggattagcatggacatgcatatcaatgcttccttgtattaattgattgattttattcattgatcttcactccctttttacatatttttttaacataaagtaaaatagctaatgcactagcaaagatagaaaatataattccaacaataaattgtgccatcatcgttcctcctagaaaactagctgtaaattcaaggatataagctgataatgatgagccgatatttgcaatcccccatgctatcgacatagctacaccaaccatatgactaggtacaaattcagctgcttttgcgtacaatgtagaatgagctaaagaagttgctaacccgataatgatggcacaagcataagcgccaatcaaagatttactaaacatcattacaattaatccgattcctacacataaataaccagctggaatcatccagtctttgaatagttttcgtaatagtggatacattaaagtaaaaacaactaaggaaaatctaacaagtgatgttgctgtacctgcttgtgttgctgttcctagtttatactctgttataatataagaagaaacattgatattaaaaacatactgagtaacatagaacagacaatgaacaaggcccatcacgacaacccaaaagataacatttttaggaagatcgtgcattgtaattttttcaccatttacataaaaattcattgaaggtttatcaaactcatttttctttgccgaaaagtaaaatataacaatacttaataaaacaaatattcctaatagataggcattgaaccaattgacaccaccatttttagcagctatcatcccaccacattgcaacaaaataacagccccaatgttgatggcaacattataattagcaatacggtcaccaatttgttcaagcggaaaatgatcattgataattccatttaaaagcgacacataacaaccttgtccatatccagctagacaacaggcaacaatatataaccaaaatggtccatgatattttccattgaagtaaaagattacacaatatagaaaaactgtaaacaaggctgaaattgctaactttgtcttactgcgatttaaagcgattggaccaatagcaaacgaaaagataatgcaggttagacttggtaatgttactagattcgctaacatcgtttcggaaacttcaggatatgccataccaatatatgccttcgtaaccatagtaatgtgatacatcaaccatacaaacgtatagatacaaatggcagtcatgatacttttttgtttcttgttcataaaataaacctacttctcaaaataaatcatttcacaaattttagaaatcttagttttgaaatcacctgtatgaatagctggcatccattcttttgatttgaaatcatctaaaatagctggaatcattttttctgtaaattcctccatcgaatcctgaatatttctttcttgcattgtttggttaaaattcttcactcctaaaatcttgtaatatctaataatttcatcagctactttattagcatttacaattgcatcatcttccatttctaaattcatgatttttccaatattagtaatggcttcttttgaatcattagcaaaatgacgaattactgttggtaaaaccatgatacaagcttgaccatgtacaatatgataaatggaacccaaagcatgagctacagcatgtccatttggcataccaccattggctaatgcattatgcgccgcccatgataattgttctcttgctttcaaattatcaggctcatttacagcaactggcaaccatttccaaactctttttaaacattcatataaaatagtattagtataatcattagccattgttccaacaaggatttcaacgatatgacaaattgcatccagccccccattaatagttggcattgctggcatccccattgtaaacattggatcgatgatacacaaatcagctgaagtatttctattaccaaaactaaatttcaattgatgttcaacactagaaataactgcacttgctgtggtttctgctccagttcctgatgtagttggaatcagtatcagtaaacaaggtctttgccattcctctttcatcatgtttcctgattttccatattgatgtaagtctttaatttcttgcggaatacctgcaattagtgaaccagcttttgcggcatccattggacttccaccgcctaatccaatcactgcttcatagtgattttctttaatcaaatgacttacttctaaacacatttgatctgttggttcactattcacttcactataaatttcatacgctatttttgcttcatttaacattttaagcatttctatgctgatgttatgttcaatcattctagaatcagaaacaattaaacatttatgaacattgcttgataacaagtaatgaatcaattcatttgttttcttactaccaaaaataatttgtggaatttttcctttactgtaacttttcatttttttccgctctccttctaatatttacaatcaggtaatctaggcaatctaattttttttgctcgatatgaatgctatccaacaacttaaatctttgcttttttaacatcatgttcatttgcggataattacccttattaaacatacagataaattcattgataaatatttcatcacaatccgcatccaacagattttctcttattttttcttctatcactttgatcacctctgactatattttaaatgcgataaacaaatatatccaatatttaataaatatgatttaccatagttatttcctatgctaaaatgtatgtgaggtgattatatggaaattcgtgtacttcaatactttttagctgttgctcaagaagaaaatattacaaaagcagcagaatctttacatatggctcaaccctctttatcaacacaaatgaaagaattagagctcaaattaggcaaaaagctttttattcgtggaaagcgaaaaataacccttacagaagaaggaatgttgcttcgacaaagagctcaagaaattattcagttagtagaaaagactgaaaaagaaattagtttaggtaacgatataattaatggtgaaattgccattggaagtggtgaaacgatagccatgagttttgtattagatatcataaaaaaattatctgatgaacaacccaacatcaaatatcacttatttagcggtgatgcccaagatatcggtgattgcttagataatgggcttttagattttggtcttttaatagagcccattgatcttgataaatataatcgtattcaactccctattcacgaattatggggactacttgttagaaaagacgatcctttggcatcaaagaaatatatcgaacctaaggatatgaaaactttaaaaatcatcattcccaaaagaaaaggtttgcaaattgaatttacaaactggttaagtgataacgcaaatattattggaacttataatcttgttcaccatgcagctttaatggttgaaaaaggtatttgttatgcattcgctattaatgacattattaataccagagaaagtagtgatcttgcttttatccctttacatcctaaccatgatatcaaaattgctatcgtatggaaaaaatatcaatatttatctaaatcttcaagattatttttagattatttaaatcacttgattcaaacaagcgacaagaaataaaaaactaaatttttttataaacgtagtttataaagattttgaatcgtagaatttgctattgactaataattttttttgattatcatatcgattgcaaaaaaatatggaggtcttttacgatgaatcaaaatttagaaaaaatagcttctgcttgtttaaagtgtaaaaatgctcaatgcaaaaaacattgtcctattcatacaaacattcctaacttgatatactcaaaattgcacaaactctttgatgttgcagttagtcaaggatggataaaagaaaacccttgtaccaatgccattaaacctaaacgaaataaaccaaaaaaaattaaacctttagaaattgatcaaattaaagatttactaaaaagaagtgaagatttttgtacttataatgcagttatccattttcaactatatactggaatgagaattggcgaaactcttgcacttacatgggatgacattgattttgatcaacgatttatttatatcaacaaaactgttaatttgtgaaaggagaatttaaagttggtcctcttaaaactgaaaacagctatagaacattgggtatgaatgaaactgtctttcaacttctcaaacaagtaaaagaaaaccaagataagatgaaaaatgacctaaaagatatttggcaaaatttaaatttagtatttactcaagataccagtggatacattcaaaaagctaatatcaacaatcgattaaactcaataaaaaaaggaacaaactatgaagacatcactgttcattccttacgtcattcaaatgcaactttactccttttaaatggtgttgacttattgtatcttctcatttagggcacaacgacattcctaccactgctaacatctatattgatgtcttaaaatctcaacaacagatggtagtacaattgattgaatttaatcttgaaatctagtgtacattccctagaattcactgatttttaattatatcaagtatttttaagtccctaataagcccctgatacaatctaatatgcaaaaagtgccgataaataggcacttttttagtgtttttattattcgacaccaactataaatgaataaacaggctgtttaccatttactacttctaattcagcctcaaaattatcttcaacaaaactttcaatttcttcaatgtcatcatcatttacgtcttcaccataaatcaatgtaatcaattcagcatcctcatctactagtttttctaaaacaacttttaatgcttttaatttattatctttacaagcaacaatatctttttccaccaaagccatatagtcgttagctttaatttctacaccatcgatattagtatctttaattgcaaaagttacttgtcctgtttttacatttcctactgcttctgtcatttcagcaacattatcatccaatgaagcatcaggattaaacatgatacatgctgataacccttgaggaatagttttcgttggaataacaataacatttacttcatcttctaaaattgttgctgtttgttgcgcagtcatcacaatattagaattgtttggaagaataattacatttttcgcatttacatctctaactgcttgaaccatatcctcagctgatggattcattgtttgtccaccactaacaacataatcacaatgtagttctaaaaaagcatcctttagaccatcacctgcacaaacagagataactgctgtttctttagcttcacgttttggtttagcattgtcatcaactccgacaatcgttcctgcattactttgaatagtatctgcctgttcttgcatattttcaattttcagtttaacaaattcaccaaatcgttgagcaatgtttaaagcattaccaggttttaaagtatgaacatgaactttaacgatatcttcatcttgaacaacaacaatactttcaccaggaattctcgctaattctttctttaattgctcctctttaaatttatcaaccaaagaaggctctagacgaacaataaactctgtacaatatccataaccttcttctccaccttcaatatcagctacagcattcatcgcggaatcagatgatttaatttctacataatcgactgtttctcctgctaatccagctaaaaagccagtaaaaactaatagtagtcctgctccaccactatctactactccaacttcttttaaaactggtaataattccggtgttctttctaatgaagcctctgcttctttaacaaaataagagaaaacatcttcaatttccattccaggctttgcgtattttactaccgcttcactcgattctctaatcactgttaaaatagttccttcaacaggacgcataacagctttataagcaacctttgcaccactttctagtgcttgagcccaaagtactgcatcagcttcttcatgaccttgaagtgccattgaaacccctctaaaaatttgtgataagataactccagaatttcctcgagctcccattaaaagtcccttagataatttttttgaaatttctccaatattatttgaatccattccctcaatttctttagcaccagcagaaaatgtcaaagacatatttgttccagtatcaccatcaggtacaggaaagacatttaatgcatcaatttcaggatgattattatgcaacgtatttgcgccacataaaaccatctctttaaataattttccagttacaactttcatcttctatctcctctactctattcctcgaacaccttgaacatatacattcactgattcgacatttacatctaaagtagactcaactacatatttaactttcttttggacttcacgtaatacttccgtcattttaattccatatcctaataaaacatatagatctaaaattaaaccagtttcaccatctcgagcaacgattcccttagaataattttctttacgtaacaaatcataataaccatcttttaattttttttgacttgccattccaacaacgccataacattcaattgcagcaccgccagcaattgtagcaacaacatctaaagaaatgttaacagttcccatattattatttttttcaatcatttatatacctcctcgtatacaattgaattgtattcatcaataactaattatatcttaaaaattcgttcttgacaattatattgcagtcagaaattattgtaacaaaccataaaaaaaattcaagcaaaaaaaatgtaataatttttcaaaaaataattgcaatttaaaactaaaaatgatactatatgcaagtacgttaaaacactactaatgaagaggaggagaacctatgtcaagaaaatgtcaaatcagtggtaaaggacctatgtctggaaatacacgttctcatgcattaaactcaagtagaagaaaatggaatgttaatttacaaaaagctactattttagtagatggtaaacctacgactgtaagaatttctgctagagaattaagaactttgagaaaatcagcttaataatataaatagtactgcggtactatttttattttatccaattatagttattctatgattggtttttttgaaactttttttcattaaatttacattattttcttattcaatgaaactatattaataaacaaggccaatgtatttacacctcaattatttcctaatatgataatactatataaattaggaggataattaaatgacatttccaaaagattttctatggggtggtgctgtaaccgctcaccagagcgaaggtgcttataacgcaggtggtaaaagtcctgcagtgtgtgatctcttccctaaaccagaacatagtgattttaaagacggaattgatagctatcatcgttatgatgacgatttttcattatttgaagaaatgggcttcaccagttatcgtttctcaattgactggtcaagagtatgcccagatggtattaactttagtgaagaaagtatgcaattctatgatgattttattgattcaatgattcggcatggaatggagccaatgtgctcattatatcacttcgaaatgccccaattgctaatgaataaatataacggattttattcacgggaagtagtagatatgtttgttacctatgctaataaaatgattgaccgttatggtgatcgtgtaaaaaaatggatttcatttaacgaacaaaatgcaattgctttaccaggcagcagtaaggtagcttatggtgccgtttgtccaaaagacattgacgaacaaacatttattaatcagctggttcacaatacttttgttgctcatgctaaagttgttgaaaaagttcatactatcgctgatgctaaagtcttaggaatggtaatatatattcctgcttatgccgccacttgtaatcctcttgacgagctagaatctcgaaatcaaatggcacttacagacatgtattttgatatgtttacgtacggggagtattcaagttacatgatggcaaaaatgaaaaatgaaaataatctgccaaaaatgctagatggagatttagagttgctcaaaaagaataaggttgactggctatcattaagttattatttttcaacagtagcttcacatggcaaactaagcattgaaatgaacggtaatgcaaaagcagctaccaatccatatttaaaagctagtgaatggggttggcaaatcgatccccttggtttacgtattggtttaagggatatttatgcgaaatatcgtttaccgattatggtcgttgaaaacggctttggaatgcgtgatattttagaaaatgaaaccgttatcgatgatacaagaattgattacatgaaagatcatcttgagcaaatcgcattagcaattaatgaaggtgttgactgtcgtggatatttaatgtggggaccaattgacattttgagttctcaaggagagatgtctaaacgctatggtactatttatgttaatcgggatgataaagacttaaaagatatgaaacgttataaaaagaaaagtttttattggtataaaaaagttatttctaccaatggtgacgatataaaaaatgattaatctaaaaattagccgttttggctaatttttttgttttaatatctatacatctaaataaaaagtaaggtacaataaaaagtaggtgatagaaatgaaaaaactaattcaaagattatattatcgtattaataatcgggtcctcgactaccgctataaagttaataaaaatgctggtttatgctttgcttactatttaatcatgtcaatcataccgatttgttcactgtttgccttctttgcctccatattaaatgttgatcttggcaccttagaacaattactaaaaaactacttaactcctgaattttctaacataataattgcatccttaaaatcaagtcatattactttatcatcaataattatcttatttatctcattatttgttgttagtcgaggaatcaaccagctttatggaatttcaaaaaacttatttccttctgcacatcaaaggaatataattattgaacaattattaatgcttttaaaaacgattgctgttttcgttttattattactaataatatccatattaacaatcatccctctaattaattattttattaattttaaagatattttagtacttggtgatttatatttatttttagttttttttattattttatttttattatataagattattccagatgttcatgttcacatttttgacattgtaaaaggagccttttgttcaagtatactgatgttaattttattatctgctcttgaattttattttagcatagcagattatactagcgtatacggtccattggcttctgttgtagttattatgatatctttttctctgattgctgaaacaatttttattggcatgtatatcatgtttgaagctcatatgaaaagattaatcattgaaatgaaaaaaaataatcattcttaaaaaaataaaaaacgaagaatatttttccttcgtttttattttttaaattgacgtttaaatgcatcaaaaattgattctttcttctttgaaagttttgataatttagtatataattctttttcttcagatgaaagtttagtcggaatcttaacttcgattctaaccatttcatcaccataattagtactacgaagatctttaacgcccttaccctttagacgcagtattgttcctgattgtgttccagcaggaatttttactgtaacatccccttgaacagttggaacatcaacttcacatcctaatgtagcatctacattagaaacaggaatagtaatatgaatatttcgcccttcacgtttaaaatgttcgtgacttcctacttgaatttctacaaataaatctccattaggtccaccatttgctcctcgtccacctttgccagctacgcgcaattgttgattagaattaataccagctggtatatctaattgtactgtcactgtcttagtttcatatccacgtccatgacaatgtggacatttctctttaacaacttttccagttccattacagtcaggacaagtagtttcagttacaaatgtcccaaatggtgaactttgctgctgttgaacagttccacgtccaccacagcgtgaacacgtttggacatcattaggatttttagccccactaccgttacaatgagtacatggtgcatcataagtaactttaatatctttctttacaccatttactgcttccatgaaactgatatttaaacgcattaagcgatcatcaccacgacgtggtcctgtatttctttgacgtgatcttccgccaccaccaaagaaagatccaaaaatatctcctaaatcaacatcttcaaatccaaatccaccaaaaccaccagcaccaccattaccagcaccttgctcaaatgcagcatgaccaaagcggtcataagtggcttttttattagcatctgataatacttcataagcttcttggacttctttgaacttttcttcagcaccaggctctttgttgacatcaggatgatattgttttgcttttttacgataagctcgtttgatctcatcagctgaagcctgtttacttacacctaagacttcataataatctcttttatcagccatattttcaccctctttttatactatttaaaaccaaggcggcaaagccttggctttaaatgattagttcttttcttcgaaatctgcatcaacaacattatcatcttgtgcatttgctgtaccagcatttgcatcactagctcctgctccaccttgttgttgatatgcatatgaagccatttgttgtgccatttgttctaattcagacattttagcttctaatgtagccatatcgttgttatctaaagctgcctttaactcatcttttaatttttcagcagattctttttgagtagcatcaattttgtcaccttgttctgctaaagctttatcgatttcattaatcatttgttcagctttatttcttgtttcgatatctttacgtttttgttcatcttcagctttattagcttcagcttctttaaccattctatcaatttcttcatcacttaaaccagttgagttttgaataacgatagattgttctttttgagattttaaatctttagctttaacatttacgataccattaacgtcaatgctgaaagttacttcgatttgaggtacaccacgtggagctggttcaataccgtctaatttaaataaacctaattgtttattatctttagccattgatctttcaccttgtaaaacgttgatatctacagcaggttgattatcagcagcagttgagaatacttgagatttagttgttggaatagttgtatttctttcaattaatactgtcattacaccacccatagtctcaatacctaatgataatggagtaacatctagtaataatacatctttaacatcaccagcaataaccccaccttgaattgcagcacccatagatactacttcatcagggttaacagatttatttggatcttttcctaataattttttaactgattcttgaacagcaggaatacgggtagaacctcctactaataatacttgatgaatttcagttgggtccataccagcatctttcaatgcttgacgtacaggagtttcagttcttaaaactaaatcacgagttaattcatcaaattttgctctagttaatgttaattctaagtgtaaaggccccgctgcaccagctgagatgaatggtaatgaaatttgtgtttgcatagttcctgataagtcttttttagctttttcagcagcttctttaacacgttgcattgccattttatcatttgataaatcaacaccttgatcttttttgaattcttcaacaacccaattcatgattttttcatcaaaatcatcaccaccaagtttattatccccagcagtagctaatacttcaaaagttccatcagctaagtctaagatagaaacgtcaaatgtacctccacctaagtcatatactaatactttttgttcttgatctaatttatctaatccaaacgctaaagcagcagcagttggttcattgataatacgttctacttctaaaccagcaattttaccagcatctttagtagcttgacgttgtgcatcgttaaagtatgcaggaactgtaataactgcttgtgttacagtttcacctaaatatgcttcagctgttgcttttaagttttgtaagatcattgctgaaatttcttgtggtgtatagtctttaccatttgcatgttctttatgatcagtacccatatgacgtttaactgacataattgtatctggattagttactgcttgacgtttagcagcttcaccaacgataatctctccatttttaaatgatactactgaaggagttgttctgtttccttctggattagcgattactttaacttcaccgttttccataacactgacacatgaatttgttgtacctaagtcaataccaataattttacccataattaaattcctcctatttattcacttacttttactaaagatgcacgaataacgcgatcttttaacttatatcctttttgtaactcttcaacaatcatatttgttttaaagttatcatcttttacggtcataactgcttgatggaagtttggatcaaactcttcaccctcagttttaattacttcaacaccttgtgactttaatacttccatcagttggttataaatcatttcataacccttcaaaaagtttttaatttcatcactaggatcaactacagctaacgatctttcaaaattatctacaacaggtaataattcttcaataaatgattgcatcataaatttcattgcattagcatgttcgttctgtaatctcttcttaagattttccatatcagcaaacactttataataatcagttttccaagtatttacttcatcttctaaattcttaagttgatcttcaactgtaatttcatcttcttttgtttcaactgtttcttctgcagtcttttctgtagattcttcatctactactgtttctttttccttagccactacattcacctctattcatcgtttgaatcatctgattcgtcaaagaacgcctcttcaatattccttgaaatatactctactaaggaaactactttttcataaggcattcttgttggcccaattactgaaatagatcccttggttctctctcctgttctaaatgaagctgagatgaccgatacatcctcaatttcattaatcggtgaatcagaaccaattcttaccgttactccttcttcatcagataaaggttgtaaggcattccatacttgagagttttcaaatgcactaacgattcttctcaatttatttacatcattatactcaggctggtataacatattttcttttcctgaaaaatatacattgctcgaagcaaatcgaacaaaagcttcaagaaaagcattaaataattcctcatgctccttgattttagctgataacaccggttttacatcacgttctaaacgaaatgctacctgatcaatcggtgtccctatcaataaatcattcatcactgcaacacaactcaccaaatcatcaattttatgattacggtttaaatcaaacaccttgttttcaacatagccttgattcgtaataataatcgcagtaactcggttatcattcaaaggaacaatattgatttgctgcaaagtatcttcgctagaatctggtcccaagactaccgatgttagatgcgttagttcacttaacatctcacaactttcatgaataatttcattcaaaccacgatgacgatcgctaaaaatttgcgctacttggtttttaatcccttcatctagatcccgctttgcaagattatcaacatagaatcgatatccttcaaccgaaggaactcgtccggaagatgtatgagttttttctaaataaccatactcttcaagaaaactcatctcattacgaatggttgcacttgaataaggcaattgatattttgtcatcaaagcttttgacccaactggttcagccgtttcaataaactcatcaacaatacatttaaatactaatagttgcctcgctgtaagcatcagttccaccacccttagcactcatctttcctttgtgctaaatacattatacatcaataattagcactgtcaacacctttgtgctaaaaaataaaaaaagaattataaatccgatttctatttaaaacaactctataatcaatctaattccttgataaaatcacaaaaaaaacagccctaaggctgttaaattttttcaaaaacacttgccggttgtttacaaactggacaaataaaatcttcaggcaattcatctgcttctaaaataaatccacaaacagtacatctccaaccatgttttgaagtatctgcttgataactagaagcatttttaggtgttgttccatttttcttattatgataatttgcataggttaatacttcaccttcattaatcactttacaatcaataacatcgccaacaaacataatatgtgttccaacatctgtcattgaaataactttaacactaaatgaagcagctattccttcggtgatttgtttaatattttgacaatcaacttcataatcaatcccatcaaatttgttaacatctttaccagactgaaaaccaaatcttctgataacatccatatcaatatcatcaagtaataccccaacgttataaacacaactattttcaattaacgatgtagtataattatttttattcagcgtaatacaaactcgtgccggctctgaagtaacctgtacaaaagtgttagcaatacaagcactatccttaccatcacaactgctagatacaacatacaacccataacttaacttaaaaaatgctttattgttcatatcccaatctccttattagtaatgattactatttgattatacatcttttatttcctattgtaaacccaatttagaagatttaaccgttcactatacgataactcatctaattatccccgtttataaaaaatctattaagatttcatttaataacttaattgattcactagttgcatgtaaataatcattttcaattactaacgttttcatcttcaaatgtttatcaatagcagtttgataaacatcaactgctctaagaccatatctcttttcaaattcttttaaatctaagcctttcaccaaacgtaatgacatcattaaatggttaaacatcgtttcttctttagaattaatcatctttgtgattgtattttgacgacgtaaataagcatttaaattacgattatgttctattaagcaatcatcaatttttccactggctcctaccccaattccataatagttatcatactgccaataagctaggttatgaagtgactcatatccagttttcgcaaaattactgatttcatatttatggaaacctatttgttctaaagattcctctatcaattgagtgattttcgattccacctcttcatcaagcggttgataatttagatttttcaagacagtatgatcttctaaaattagtgagtagtaagaaatatgctcgatcggtaactgtctaaccttagctaaatcattttttatatccgtaatcgtttgattaggcaaaccatacataagatcaattgaaatattattaaaaccaattttgcgtgcataatcgataatccgctcaacttgtatagtcgtatgctggcgattaatcttttttaaaaggatatcattaaatgtttcaaccccgatacttaaacggctaacaccacctctttttaaaatatctaatttataataatcgatactttctggattaacttctatggacacctctttagtctcactacttatgtatggtttaataatatccatcagccattctaattgttcatcatttaaactgctcggtgttccaccaccaatatatatagtctttagcggctctgtaatatttaaagcttgaagttcatgctttaaaaccgccaaataatcatcggcttgatgttcgttataaaaaactttacaaaagtcacaatatgcacaaatttgttcacaaaaaggaatatgcagatataatgaattagtcttcattttcaaaaccaaattctttagccaaaccacctaaagaagtttccttatacgcactatttaaatcttttcctgtttctttcatcacccgaacaaccgcatcaaaagaaactttattttttctcaagtaacccagctgcttagcatacatcgccgcatccattgctctaagtgcaccaaaaccattacgctcaatacaaggaatttgaacatagccgcctacaggatcacatgttaaaccaagattatgttctaagcccatttcaccagcatattgaatcagattattattaagttctaaaatccagccataagcagccgctgccattgcacaagcacttccgatttctgcctgacaaccaccatcagcgccagaaatagttgcatttgttttaataacattgccaaatattccagctactgctaatgcttttataatctcttttcgaggaatttctaattgtttgtaacaataatataagactgctggtaaaactccgctagctccacatgtcggtgcagtaacaatacgatgtccactggcattttcttcactaaccgcataagcataactactaactaataagcgatctcgttctccactacgacgtgtgttgattgcttgttgatacattgatttagcaactcttttcaatcccagttttcctggaataactcccgttgttgataatccagcttcaacacaagcaaacattgcatttagtacttcaaataaataagctttaaaatgctcatcttcatactcgattgtataatcatataaattgattcctttatgatcacaatattctaaaatttccgttaaattaccatgcggatatacttgcttagaaggttgcaaagaactatcatcatacattaaagctccaccacctactgaataaactgtaattttatcaagcaattgattttcccgatatatttcaaaaatcatcccatttggatgtttaggtaatgctgtattaacaaagtgtatcttaacactatctttacctaaagtttcttcaataatgtaatctgttaaatggcctttccctgtcaatgctaacgagccatgtagatatacttcaaaatgtgtagcctgaggataagtttccttaacctttaatgccgctctttgtggtcccatcgtatgggacgaagatggtccaaccccaattttatataactctcttaatgattccataatacctcctaaattcttaccataaataattctaaacccatttttttatccattttacctgttttgatttctacatcaagacgtgataaatcatctaaacattgcaataattcatttaaatcaaaatcttttccttcttgacgaacatattttaatcggtaaggattaactcccagtatttttccaatttctttatcattataacctttacgatccaataatttaacttggtaaattagccgcatttgacccgctataagaacaatcaacttaattggttcctcatttaaaatcattagatcatgataaatcgaaaacatttttcttcgatctttttgaagaatcgcactagttaatgcaaaaacattttcatccaacggcttacttaccaattcatcaacaatatcatatgtaatatgtttgctgtacaaacatagtttttccacctcaagagcaacattattcaaactatctcctaaacgactcaataataattctaatgcatcatcatcgatcgttgcatctcgacgtctgattgcttgacgtgtactgtctgatagcttataatgattaactttatctatttcaaaaagttgtgcttgtttacgtaaatttttaacaatttttttacgctcatcaaaatctttaccaacatgataaattacaaatattacttcttcactattaattaaacatttttcaaaatactctaactcattattatctttttttactttctttgtcgttaaaaaataagggtttttcaacacaaccattttcttgtcggttaaaaaaggaggtgtgatcaaatcttcataaacttcttctaaactatcttcattagcccgatatgttgaaatattcatattatcctcattacaatcatattctttttttaaagactgtaatttttgttccatcaaaaaactttcttcaccatatattacaaatatcatttatcgttcctccaacagtaataattatagactatttaatcattaaagtcattgaaaatataattatcatcaccataataaacaatcttcaccatgcccatttcatcactacgataaacctttactccataatcatttaagcgggtaattacatcatcatggggatgaccataataattatctttaccacagctaattagggcaattttaggttttattgcatttaaaaaagctgcactagtccccgtattactgccatggtgggaaacctttaatacatcaattttaagctctggataatcgttgatcaactgtcgttctactgcattggatatatcccctgtaaataaatatttcaacttattgatcgttaccaacaaaactaacgaactatcattattatctgttgattcaggtgttttcagtatctcaatttctacctgcccaattttaaatttatcttggtatgatgtaatagtatgtccaatttcaatttgatccgcaagtgactgataagctccactatgatcaaaatcatcatgagaaataaaaacatgatctaatttaaacactcctaccgaacgtaaatatggtactaatgttaaagcagctagatctttatttcgcaatcccccagtatcgattaaaatatttccttgattataaggctgttgaataaaaaaacaatcaccttgacctacatcaatcataaccacttgaccaaaagtctgatagtatggtttaaaataaaacatgatcactaaacttagcagtaatagaatctcacggtgaattcgctgtttaatatttattttgactattaatttaaaataaatatagtaatatcctaaaataaaaaataaagatggtttagaaaaattaataaaaaaagagaagtccgtactaaaaacaacaatattatctagaacttcaattactagactaataaccggtttaaagaaattaccaaaaatcacatataaccatagcagttgatataacactgaaatcagtggtgttaaaataatccctaaaaacaatgacagtatattaattcgatattgaatcgaaataacgattggtacgctagctccataaactatctcattcaggtacctatgatgattaatcaaaataattattaaatacataaaataggaaaaaacaaaagataaattataaataatatatggattcataaatacaaaaaacatagcaacaagactaaagcagtctaattgatttagatactttttaaacaaagtcatcaaaagcattactaaatacgcccgcataaaagaaatattatatggaataatatacatatacacaccaattataattagactgaggtaattaattaaatattccggtaataaaaaaattaatacttttttaatcaaccttcttaatatatgaatatgtagtcctgacaaagcaaacaaatgaacaatcgacaactctgttaattgatgataataatcattgatcatttcatctcttattcccaaaataaacatacttgcataactattaactagctctttaccgtctattcgtttttgaagtttttgaaaaagcgtattatgtttttgactatttataaggcgtagtaaagatgcattattagtaatcccttgactatacaaatagttacgataatcaaatgcgttatcgtttgttgcacgactaatttcaaaataattaacctcaatttctaattcatcaccaacttcatagccaataaactcaccatatactttgatctttgtttttgttgttttcaatacaatgctcttttcatccctactaattatatacccgcttataattggttcatcggtcggctgaggccacctaataaacactaaaaagaaaatcataaccagccctatcgttacaagtcgcccccacccaaaatgacgaattataaagaacgcataaataattaagagcactaaaaaaactggatgaatcaacatgaccaaaacacctaacaaacatgctaccgcatagtaaatcaaatgatatcttaaagacataataactcccttattcgcaaataagttttttctcctatccctgatacttcttttatctcttcgatggtagcaaatgggtgttcattacgataatcaataattttatctgcagtttttggtccaattcccttaatcgtcatcaattgttcttttgatgcatgatttaaagaaattaaatttttatttatagggatataaaaaactgtttggctatccaaaacagttttttgatcaaatccataaacattatcagtatttaatgctttaaatacatcttcgattgttggtgaagaattaaatactaaagtttcattatacttaccttcaacaattatttttacttgtggatctgattcaatttcatttaatgatgtttcaggcaatgtaaatgaataaacagttgagataattaaaataattaacaaaccaataatttcatgttttttcacaatacctccacaaaaaaagactgtaaaaacagccttattcatcaatatttatatttaaatgtttatatgcttcactcgttgcaacacgaccgcgaggagttctctttatcaaaccgatttgaagaagataaggttcgtagacatcttctaatgtttgtggttcttctccaattgaagctgccagagattccagacctaccggtccccccttaaagcgatgaatgattcctaacaagtatttatgatccacatcatctagtcctaattgatctactttaagacgatctaaagcctcaatcgtccgctctttactgataatttcttcaccgttgaactgtgcaaaatctcgaacccgtctaaataatcgattagcaatacgcggtgttccgcgggaacgcatcgccaaagccgatttagcgtcatcatccattggcattgagtagacacgactggtccgatcaataatcgtttttaaatccgtttcatcgtaatattccagtttagaaataattccaaaacggtctcgtaatggtgctgacagatcaccagctctagttgttgctccaactaaagtaaatggcggtaaatcaattcttactgaacgtgttgatgcttctttaccaatcactacatcaacacaaaaatcttccatagctggataaagaatttcttcaaccactttatttaaacgatgaatttcatcaataaataaaacatcacccggttccaatgctgttagaatagcaactaaatcaccagttttttcaatacttggaccagttgtaattttgatatttgtccccatctcattagcaataatcattgacatcgttgtctttcctagtccaggaggcccgtacaataacacatgatctagtgattcgtcacgcagtttagctgccccaacaaaaacttttagattttcttttaagttagtttgaccaacatattcatcgaatgatgaaggacgcaaactactatcatcatcaataacatttgcatcaagaatctcattccttgtcattttctacctcctactttactaataaacttaaagctctttttacataaccgttagtatctagtttttcatttaataggactgccaaagctttatccacttcagattttttataacctagggcaattaatacttcagccgcctcgtctaaatcattattatttatcagtgttgttgctgttggtgtatttttaaacttaccttgaagatctaaaataatctgctgcgctgcttttggtccaattccaggaattttctttaaatatgctacattccctgtttcaattgcacttataatgcttgttacatcaccagtagctaaaattcctatcgctgttttacaaccaatccctttgaccagaattaattttaaaaacatttctttttcttcacttgttttaaatccatataataataatgcatcttctttaacttgttggtaaagaaaaatctttatttctttacctcgtgtatattcatatggattattgacatatatcaaataaccaattccactattttctacaacaatatgatcaatattcatctcaactaccgtaccaattaagtaactatacattccctactccttcacatttactattatacagcacatcgtactgttttttatctcaaaatcgtttcaaaccattctcaacaattatagcattgtaaaagaaaaaaaccaactagtattactagctggttactcataaaaatcaaattcaaactcaccgatagcaacattatcaccatcttgagctccggcatttctaagtgcatcatcaacacccatattacgcattttaatcaatagtcgttttaatgaatcatcacttactaacgatgtcattgccaccattctctcgatcttcttgccagtaatttgccaattaccattacctaaattatgtaattcaaatggtttatcttcctcatcacccattgtataaagaacagtatgttcaacttcatcttccattgtgaaagttggtgcagtagctaacgcatcagcaaccgcatataaaacctgatctacaccatcatgaataatagcactaattgggaaaatcttaacatcttcaccaacctgttttttaaaacgaactaaattttcttcagccccatcttcatccattttatttgctacaacgatttgaggacgttctaataaacgatattgatattcaccaagttctttattaatagtaacataatcctcatatggatcacggccatcgactgctcccatatcaacaatatgaacgattactcgacaacgttcaatatggcgcaagaattgatgccccaaacctttaccttgagccgctccctcaatcaatcctggtaaatcagccataacaaaactacgtccatcttttacttgaaccactcctaaattaggaacgatcgtagtaaaatgataatctgcaatttccgggcgtgctcgtgaaacaactgataagagtgttgatttacctactgatggaaaaccaaccaatcccacatccgccaataatttcaattcacaaataagatcgaaattttcaccaggttcaccacgctcacaaatttgtggtgcaggattccgtgaagttgcaaaacgcgcatttccgcgaccaccacggccacctttagcaattacaacacgttgcttatcttcggttaaatccgccatgatctgcccagtttcttcattaagaatcattgttccaaccggtactttaatgaccgtatcaatagcatctttaccatgcatttttttagccatcccattttgaccagatggtgccttatataatcgattatatttcaaatctaacaaagttgataatgaggtcgtcgcttgaaaaatcacacttccaccacgaccgccatcacctccagctggaccaccttttggtacatgggcctcacgtctaaaagctactgtcccgtcaccgccttttccagcttcaactctaatttttgctttatcaataaactgcatatatccacctcttttcatctctttattattatgatacaaataatccgttattagtacaagaaaaaatccctttgcagggattttaattatgcagctgggtaaacagaaacttgttttctatctctaccaagtctttcgaattttacaactccatcaactgtagcaaataaagtgtcatctccaccttttcctacattagtacctggatgaactttagttcctctttgtctataaataatagaccctgcagtacaaaattgcccgtcagataatttagctcctaatctttttgatttagaatcacgaccatttttagttgaccctaccccttttttagaagcgaataattgtaaatctaatttgaacatcatatgttacacctccactttagatatcttaataaatcgaccatagctttcaaccatcgtttctaaagttacaacaagtgtctctagcaccacttgacaaacttcatcagtatgattgacaactacatttatatatccttcattaatctcaatcgttcctaagcctttagctaagaatcccttttttgcaagcatattcattgctccaataccaacagtagaaacaccagcacaaactaaatctttaccatattctccactgtcagcgtgacctgtaatactaagattaacaatttgattattattttgttttactaaaaccttaatcatttgattaagcttctgcagtttcttcagcagcttttttagcagttttattaattgtattgattactaattttgtataaggttgtctatgaccttgttttttgtggtaatgttttttagcgttatatttataaataacaactttcttttctttaccttgtttttcaacagtagcttcaacagtagcaccttttacataaggagcacctaatttcattgttttatcgcctacagctaatactttatcaaaaacaactttttctcctgcttcaacatctaatttttctacaaagatagtatctccggcttcaacttttaattgttttccacctgtttcaataattgcgtacatatcgcacctcctataatattctaagactcgccaaccaaggcagcattgctttaataccttttatgtgcggttgtagctagaggtctacaacatatgcattatattatttttacccatcaaagtcaattactttttaagttttttattaaatattgaagtacttctttttcactataaccattcccaccaatcaaataataattttcatatgggcggtaaaaacggtagtcatgattaattttaagccgatgatattgattatcatgcatccttttcaaatataatctgataattatataacggaactctttaatatattgataatttatatagagcaaataaaaataaactaagatatatcccatttgattatataatacaatcaaaactgataaagaaaaaattgaaactttaatttgtaacttgactgctcgataataatctttaaataatgaaaaaactagtaataatatttttgatccatcaagaggataaatcggtaagagattaaaaacaaatactaattggttaactgccaataaatattcgctatcaaaaaatacttttattactataaacattcccaaatgagtagatagacccgccatgactattaccagttcttcaataatatgatgagtcccataatcatttaaactcaaaaaagctccaaaagggaaaatctcaactttctcaatttcaaaattaaattttttagcaaaataatagtgtccaaattcatgagtacagacaataaacaaagcactcaaataagcaaataaattgtcatttaaccaagcagcgattagataaatcaaagtaaaaggatggatataccaatcactccatcctttgatactcttcataactaatttccttacctaaatgttcaaactgtaaaacaaactgatcttgataactgcctaaaaccatcccttgatctacctcgtcatacaatgtcaccattacattatcaatattactataagtaatttctacatcattcttgcctagaattactacatatccgctcaagttttcatcattaccagttgcaattacgcgcccagcttcaatacttaatacctcattactattatttttataatagtcatctttaacatgctgatactccacgccactagaaacactaacatcatcacttggcaaaaaagaaaataaattatcagatatccagcttgttaccgctttataattagtatcattcaaaatcattttcttaatattagaatccggattgattttaatatatgacattgatactaaaaccactaaaattacgaccataaactttaccataaaattatagaatcgcttaaaattatcatcatttaatggctttttattagtgccccggcgcttttgcattctttttcttacatcatctagatcactcattctatcacctattccattatatgaatctgatgatattaaagacgttaattatgaataaaaaaatcgacgaattaaacttttctttttatatttagcataaggtacttgctgcccgagtatgcgctttgaaatattaacaaaacagctatgtaataaatgttgattatttaagaaaatcggcacaccacgattattagcttcaatcatatcatggctatcgtaaacaatccctagcagcggtaatgataaaatctcttgagcatcttccaccgttaatgagcgagctccttcaatatcatcaacattaactttattaatgatcatattaatagtattaattccctttttcatcaataaaccaacaacacgatcggcatcacgtaatgatgatacatctaaattgacaacaacaattgcttcattagctaatgaagcagaatattgaaaacctttttcgactccagctggactgtccacaataataaaatcataatctttatttaatcgttcaattaatgaattcattatttctgtatctagattttcaaatgataaagatttacatgacggtaataagctcaatccatctatacgcttatccttaactaatacttgttcaattgtacagcggccttcaacgacgtcatttaaatcataaactacacgattttctaaccccatcatcacatccaaattcttcaatccaaaatcaccatcaattaaacatactttaaattttgaaaaagctaaggcactagccagattaacgctaacactacttttacctaccccaccttttccggaagtaactacaataactctagacatatatcatatcccccttatctaagaatatttcgttgtccttataataaagcatcgtaagttcataacttgtataatttcgtcgagataccccattaattctaacatgggcatttttaaagaattgtccactaatttttgctcgagcatttaatccctcaaccaatccactgacgcgccccattacatacaactttcctttaaatctaacaatagctccgggattaacttgaccaataatcaaagcatcttgatccaattctaaaatttctccagcatgaacagttttgttgattactttaatcttatttttcttctctactttggccatattgattccatcaaacaataatacctgcttactaaataataaatccaataatcttaataattcatgaatacttaaaattcgacttttaaaatcaaaaaaagccctcggataatagccatcacttttaagcaatggtgattccaagagactttccaattcattcattaaactattaaaatcttgattatcatctaaaacaaaaactagatgattattaactccttttactttgatatgcattgactttaccctcgaatcctaatttcttgtggataaaatatactggtgcaatcaataataaattagctcctaacgtcggtaaaagacgatttgtcaagaaagctacgattgatagctgcgtaacatttgttatccacactaaccaatatatcacaacttcttgggcgattattgtcacaattacggcgataaacatctctaaaagggtataagttgctaatttagtatatttctttccaaaaaaagcataaacacaataaagcaacacataaatcagtaaactatttgcgtagacaatcgcataataaagtccagtcacagttgcaaatatgtatcggtgttcatcaccaattgtattattcagcaatgtgaacatcatcaaactaacacaaggaacaattgttattcctaatttatcaaaattatacggtaaataataactaataatgctatcaacaacaaaacttaatgccatcactagataataacgatataattgcttattcattactatcgctcctaaacactaccgcaacatatgacagatcattaaaatctgctgccggcttaactctaattgtttttgatgttccatcttcagaaacaatagaactttctacagttccaatataaattcctttaggcgctttcccacctaagccagaagttattactttggcattatcttcaaatttttcaacatcactaaatagagtaatttcaaaacattttgactcaatgtcataacgatttaaaagtccataaacattttgatcaccattaataacttgaatcggtaatgcagaagtaggattctctgctgttaataactgaactcgcgccgtcacttctgtaaccgaagtaaccttaccaatcattccttttgaagaaattacgaccatatctttgctaactccagccaaacttcctaaatcaattgtaatttcgttattccaatcatcactttcacgaacaaatgatgttgtcttaacattataatcagttggcaaatattcaatatttagcatctttttcaactcatcaatctcttttgaaagaacatcagtattaacttcgacactggcataagatgataattttgcttttaaaatcttattttctttataaacatcttttaactcattatattcactaaataaattacttacaaattcaactggtttttttactacataatactctattgcagcaatcgaatcgctgaccattcgctcaagtcccccttgggttcttgaaaataccaatgatatagtagaaaaaacaacaattgctaccgttataattaaaactattctcttatttctttgttttttacgattattcaaattaccacctcacatccatatcattataaggcattaatataaaataatcaattatctttaaacttcaataatcttatttgaagcaaaactataaaatctactacgaccaataattaaatggtcaactacatctatatctaattcttttgccatactatataggcgctcggttgcttcaatatcttcaattgatggttcaggattacccgaaggatgattatgaacgaccatcacacgattactaccacagatcaatgcttctttaaacagctctctcccactaataatagatatgttattcccaccaataaatacggttttttctttaattacctctaagcgtgaatttaaacataatacaatcactttttcctgctgttcaaacattaattgatttttcaacaattcataaccatcacgcggttccttaatagctgacatagccacaggctgtttatccaaacgtttagcaatttcaataatagctaaaacttctattgctttagcttgtttgattcctttaatctgaatcaactgataataattgatatcatgcaaataacgaaaacccccaatttcatttataacacgttgagccaattcaatcgctgattcttgcttatttccagttcttaagactaatgctaataattcaatattatttaggctttcaattccgtgatggaaggctttttcgcgcggtcgttcttccaatggatagttttttaatttcatgatcctaattctttaataattgcttcataatcttgtttttcaataacctctttaaaactactttcgaatttcgtttgttttattacacatgtgattccactttcactaattgtattccccatgtcctttgcctccttttcatccaaaaacacacctgttatcactacgaaattattatctttttgatacttataattcggtttccctaaatctgataacttttttatcatttcattagcgttttcatcttgtttatatattcctacttgaactatgtaagtattaatataactattgatcgttgaaaaaaacttcaaatagattccacaaaaacaaattgataaagcaactgctaacactactacaagtcttactattttcatcttgcacctccaaatctagtatatgttagcagtttataaatatgctcaattaacgtgtaattgaaaaacgttttcttaataatttagcaacgctataaccagcagctacagctactaaagaaatcacataaacaatcgctccgccaccattgatcttttgctgagatgtaatcgataattctttcattttaacgccactcgattgaaataattttaggaatcgatacacgtccagcccccgaacgaaacatcttataaattgcagttccaattacgacacaaaagaaaaatcccgtaacaccaccgcccattacttccatttgcatacattgctgtaattcattcatttttcttgcctcctcttttgaatttaaggtcacactcaccactaaaccttatattattatttactgcaagaaaataatttttacttttaaaaatagaaaaaagatgaatttcttcatctttttacatttgttctaatttttcttttacagcatcatacttagattgataatccgctaatttatttctttctagttcaactttttcttttggagcttttgaagtgaacttctcatttgccaacatattttgacaacgtttaatttctccttctaactttttaagttgattagctaatttttctttttcagcatctttatcaatataatcccctaattcaactaataatgaattaccacctttaattgtaatatttgcaacctcaccagcagcattaagattataacctgaacaaactgcattacataatttcttgatgtaaggtaaacatttatttaacaatccttctagatcatcgtttttagtattgatcacgtatggcacttcaattgcatttttaatcgtatattgtgttctgatttcacggataccttttacaatatcgattaaatatgtaaattgatcattaatactttcatcagtaaaatgatcatttacttctggccagatagcaatacaaatagattcttctaaatgtggaattgcctggaagatttcttcagttacaaatggcatgaatggatgcagcattttaacaattgcatttaaaacataaactaatgtatttaaacttgcctgtttttctgtatcattagtactatttaaatgtacttttgtaagttcaatataccatgaacagaagtcatcccaaataaatttatataactcactaccaacattaacaaattcaaatttatccatgttaatatctacttcacgaatcacttcatttaaacgatttaaaatccatttatcacaaagatttagattatcaaatgataattcttcaaatttcatttcatcatcaatattcattaaaacaaaacgagcactattccaaattttattgataaagttccatgatgcttctaatttttccggaatataacgcaaatccattcctggtgccgaattagttgttaagaagaagcgtaatgtatcagcaccatattcatcaataacatccatcggatcaacaccattgcctaacgattttgacatctttctcccttgttcatcacgaatcaaaccatgaattaaaacatgttcgaatggtctttcctcagtgaagtgtaatgattggaaaatcattctgctcacccagaagaaaataatatcgtaccctgtaactaaagtattggtaggaaaataacgcttaaataattcactatcggtattaggccatccaagtgttgaaaatggccatagtgcacttgaaaaccatgtatctaggacatcttcgtcttgtttccagttttctaaatcagcaggtggatttttcccaacataaacttcaccggtttctttatgataccaagccggtacttgatgtccccaccataattgacgagatatacaccagtcttcaatattttccatccactgattaaatgttttttcaaaacgttcagggacaaaatttactttagaatcctttaactgattttctaaagcagccttagctaatggctccattttaacaaaccattgttttgataaatatggttcaacgattgcattacttctttctgaatgccccacctgatgcatatgtttttcaatatggtcaacaaccccagctgctttaaaatcagcaaccaaagcctctcgacaagcaaaacgatccattcctgcatatttatgtgccagttcattcatagttccgtcatcattcatacaaattggcatttctaagttatatttttttgctaacgcaaagtcattagggtcatgagcaggggtacatttcattaccgctgtcccaaatgacatatcaatatagctatcagccatgattggtaacgcttcaccattagctggattgattgcttttttcccgactaggtgagtataacgttcatcatcagggtgcacaaatatagcttgatcggcaaacattgtttcaggacgtgttgtcgcaataattaattgttcatcactatcaacgatttgatatttaaaataatacatcgccccttcaatttctttatgaatcacttcaatgttacttaatgccgttctttgaactgggtcccaattaatgatccgtttcccttggtaaatcaatccttcattatataatttaacaaatacttctttaactgcttcgcttaaaccatcatctaaagtaaaacgttctttagaataatctaatgacaaacctaatttttcccattgagctcgaataattgaagcatattcttccttccatgaccatgctttttctaaaaagccatcacgaccaagatcataacgagaaataccttcttcacgcatccttgcctctaccttagcttgagttgcaatacccgcatgatccattcccggcagccacaaagcatcataaccttgcattcttttataacggatgatcatatcttgtaaagttgtatcccaagcatgacctaagtgtaatttaccagttacattaggtgggggaataacaattgaatacggctttttgctagtatcaccagcttcaaaatattttttatcgatccaatgacgatattttccttcttctactttatgatgattatacttcggttccagttgtttgctcatcagttgttacctccaaatcaataaaatcatttttgttttcacgaataaatttagctgctttattaacaattccagaagatttcaacattgacaataatgagcttgtaaaatcagaaaaattatattttccataatcactatcttcatctaattcaatttcttcctcattttcaatcattacagctaatttttctgctgcagtcatcaactcagcaatttcatggcaatccacagcctcaaatgctttaatggcatatggacgataaaggcaatatggttccttaataaagaatgagtgcaatgaaccacgccctccttccattgaaagttctacttgataaatagtgtagatcagtaattcgcttggtgtcattacatcaatcaatgttccagtaatttcttctccttcatacaatttatcttcttttgctaaaaggtggaataaaacagcatgtgttaactcttcatcaggagtttgatcaaacacttcgcttgtaaaatgactatacttaacccggttttcttcatatgcagcccgctgttgtttttgatattttttaacttgacgcattttaccactataaaaatacattaaaaataaacatccacctaaaaataaaatccaaaccactgaataactcataatttcctccttaaaataaaaaagcaccgtcataaggacgaatgctcgtggtaccaccttactttgcatagcttatctatgcctcaagaccttaacgcagtcatacgtgtctacctactttttttcaatagacatgctcctaggctaccttcaatccattatcttatccccttccaccagccagggactctcttaaaagtttctggatctactcctcctaatcattgctagaaatattctaacaaaatcatcagccctagtcaatcgctaactttttatttaacgaagaaattgaatccaaataatataataagcgagacatcatgataatattattaatttcatcatgtcctaattcaatgatcggaacaacatgtaacaaacactgtaataaaagccgctcttcttttaagagctttatcttacaaaaataactatcaagaataacgtcaaaatcaaagataaactctggaattctttgatacatattataaatatcataaatacataagttgattttaatttgatcaatagaaattaatttactttctttcatcattacatgactataattaaaattattatatgtcagacataatcttatcgtatctagattgcaaacatattgttcatagcattccaaaagttctaaggctttttttagacaaccttcaattcgatgataatttaaaacaaacatccatcctgttggactacgatacgataaaacttcaaaattactcataatttcattgtaataagcttgacgctcatgaataatatttgctatatcttcaatttgacgtttaaaaaaactctttgaaacactataattaaaaaaagaagttgaatgcaaatatgataagcattcataataaaattttaattttaattctttaacgattgcattatcacttgctaaccaaggacttaaataaaaagttttatcctcataacttgttagaacttgttttttataatttctgattactggcaaaaagcattttaaatgcaagctctctatatgatcaataacaacagtcaatccattgtcttcaacaaactttaaacaaaagaatccttcacgacattttactttatagactttttttgttactttaatataaccaataacttctagtgaataggcttccttaattaattcgttcatggaacatatggaatgattaagacactgccggcttctagagccttatcttggttataattgcggattatttcttcatccacactataacgggtcgccacttcactataactatcattttctttaactatatataagtaataagttcccacactatcgctagtgtcttgaaaaattggtcgtgacttgctttggtaaaccttttcttgaagttgttcactaatctcctcagccatagctgtttcttttttactgacttccattacagcagcttctttagcaacatgtgccattggttctttggtcatatgaacagccggttcttttgctgcgtgtactgatgactctgatttctgcggtattacagcaacttttgatgtttctaagtttttaggatgattatccatttcttttgccactgcttttatctcttttactgttgaagtcgtagtttcagcagccatcggcttactttctggctgctttgcttgagcaacgtaagctggagttactggcccagtttcttggacttcgacaggtttagctcgaactaattgctcaattgaagcattagctggttcagtatccttgattaagttttcaatttcttcaagtgcttcatcatgcccaagatgctcatcccgtacatatcgatcttctccttctaccaccccatgaatacctacttcaatcttaatttggatatttccatctttaataaaataatcaaaatcttcaactttaatattgaaatctcgctgatcaacaatcttatcaaatgttgccaatacatctaattcaatattttcatcaaatttatgattgccattatactctcctttaacaattaaacttcctactgctcgaacgcctacactttcaatcttgtaattaatagactcatctactgataatgataataattcattcaattgatgatttaaatcaatccatttttcaaaatatatcttttgcatatatacctcccatcaaactatatgcacgattcttaaaaatatgaaaaaagaccgccttttatagaatatactaattcattctactttgttccaccagaatctagatactttgatattatttaaacaaaataaaagtagatacatttaaaagctctatctttcttgcatctaccatcattttactttttaaaatctaattaaaattaatatcgcatagctcatagataaagttccatgcttcttcaattccttttttccttaagcttgaaaaacgaacaaatttatcttcaggatgaaaccccaaagtatctttgataattttttcattctttttcagatcatttctttttaatttatcttctttggttgccacgaccattaccggaacatcatgatgtttaacaaattcatacatcagcacatcatctttagtcggtttatgacgataatcaactaataaaataaatcctcttaaagttgaacgtaaagttatgtattcatccattgtcttaccaaattgcttagtaatactatcattaactttagcataaccataaccaggaacatcaacaaaatataatgcatcattgacattaaaaaaatttaatgttcttgtctttcctggagtccctgaaactttagctaaaccattatgatttaacattgcattaataaaactgcttttaccaacattactacgtcccgccaaacacatttcaggaaaactttcttctggccattgacttttccatgctgcggataaaacatattctgctttctttatttttaccattctcatcacctttttcattgtaccacacaataagaaaaaaagggttatttttaaccctatttttcaagtgcgtgatctagtactgtatcaatatgatcagctaatacgatttctaattcatcttgaacagattttggtatatcatcaatatctttagcattatcctttgggataataatctttttaattccagaacgatgcgctgaaattgatttttcttttaaaccaccaattggcagcacatttccccgtaatgtaatttcacccgtcatagcaatatcattgcgaaccggctgatttttaaaagctgagtagatagcagtggtcaaggtaacacctgcactagggccatctttctttacagctccttcaggcacatgaatatgaatatcttctttatcaaatgcaattttttcaagaccatatttctctttattagctttcatatagtctaatgcaatcgatgctgattctttcattacatcccctaattgaccagtaataataaatttaccagatccttggaaatgattgacttcaattggtaaaatatctccaccaaattgtgtatatgccataccagtaacgacacctatttggctatgatctaatttcttagtatgttcaaatggtgctttacctaaatgtttttctaaactttctttattaactgttaagttatcacgtttttcttttaaaacgattaataccgctttacgacaaatctttgccagcaatctctcaagatcacgaactccagcttcgcgcgtatagtgacgaataatcgccataattgcatcatcttcaattactagttgatcttcctttaaaccgtgtaaagctaactgctttttaattaaatgatttttagcgatcattagtttttcttgttctgtatatgaagatagttcaatgatttccaaacgatctctaagcggagctggaatatttcctagatcatttgcagtagcgataaacaatacttttgataaatcatatggttcttccaaataattatcagagaattgactattttgttcagggtctaaaacttcaagcattgcactagtcggatcacctttatagtcacttgacatcttatcgatttcatcaagtaagaagaccggatttattactcccgctttcttcatcccttgaataattcttcctggcatagacccaagataagtacgacgatgtccacgtacttcagcttcatctttaactccacctaatgatgccttgatgaattcacgctgtagtgcacgggcaatacttttagcgattgaagttttcccaacccctggtggcccagcaagacaaataattggtgcttttagcgatttagtcatttgtttaaccgctaagtattcaacaattcgttcctttaccttttcaagaccataatgatcttcatttaaaacatcttcaattgcttgaatatcttcaacatctttagtttcttgataccaaggtgttttcatcatccagtcaatatatgttcttactacattagcttctgaagaagctgctggcattgtttcaaaacggcgtaattcttcttcaattttatccttaacatgctgtggataaggatttttttcaagttcttcacgaatcatttctgcatcgtcttccttcggtacactatcacctaattcctctttaatagcccgaagtttttctcttaaatagtactcacgttgattttcatcaatactttcacgaactttacgattaatcgtttcttcaatttcacctatcactttttccgattcaattgaactagctactaataataaacgttcattgatattaatagtttctaagattttttgtttttgattaagatcaattggtaaatattgtccaattgtgtcagctaaaacacttgctgatactccactagttaatcgattgattgaatctagcggcatatttggcatactgcgttttgcttgttcaaaatacgaagttgtcttacgaactaaagcaacttcttcatttcgatctccaaattcatcttcaataatttcaacagttgagtagatacttccttgttgttcttcaaagttagtcagcctaactctttttgcccccaaaacagttaatttgatagttcccgaactgtcacggcgcactttacgatcaattttacaaagagttccaatatggaacacatcatcaaaagaaggattatccactaatggattgatttgtgagacaaaaatgatattgttatcatgttcattagcacttaattcaagtgcctttaaactcactggacgaccaacatctaatgttaacctgttttctgggaaaacaatcatgccccgtgtacaaactaccggtaacgttaatacagtttgttcattcattctatttcctcctatttcgctattttactaaaaagacgcatgagcgtcttttcattattttaagttgtcttttactaaatcaacagctttacgagttaacaaatcgttttcgatacggctcatatttccttcgaaaattttcttaacttcgtctaattctttttgataatattcagcaattgtttttaattctgtttctaattcttcatcactaactgctaatttttcttcttcgataattgctgcaagaatagcatttaatttcactctttcttcagcttgaggtttaatatcttctttgatatcatcttttgatttaccagtaaattgttggtaaacttcaaaatttaacccttgtctttgtaaattttgttcaatttcttgtaacattaatccttgttcttgttctaataaagcatcactgtcttctactttagaagacgctacgattgctttatataaatcatccatgaatttattttcattttcagattctttacgagttttaatattagctttgatatgatccttcaattgatctaaagtttcaacaccatcaatatttacatctttagctaattcatcatcaatttctggtaaatgtttttctttgatttcatgtacagtcactttgaaagtagcttctttaccagccaaatcagctgcaccataatcttctgggaaagtaacaacgatatcttgttctttatctacagtcattccaatcacttgatcttcaaatcctggaataaatgaaccactaccgatttctaatggatagttttcaccttttccaccttcaaaagcaacaccgtctacaaatccttcaaaatcaattactgcagtatcacctttagcaactttcccaccttcttttactgttaattcagcaaattgagtttgatagtttgctaattgttcttcgatttcttttttagttactgtaacgcgaccttttttaacttctaatcctttatattcaccaagctcaacttgtggttttactggtactaagatttgaacttccaattcatcagcatctactttttgaacacttaaagcaggttgtgctactggttcaacatttgcttcagttaaaatttcaacaaattttgtttgtaaaatcatatctgttgcttcttctaaaacactagctttagaaactcttgctcttaccatagctgcaggtgctttacctggtctaaaaccatcgatttttacatttttagctaatttatcaagtgctttttcttgagtagctttccattcttcactatcaaatgctactgttagttctacgattgcattttctaattttttattattgattttcatactattctccttttttagtttcatcacgtattatatactaacaatactattaattcaacttttttgaacaattaatcttgcaatttcagtactttaatattcaatttctttaatttcatttaatttttctaaaatttcttctttatcacaattataaaggtactcgatatcatctaattcaatgtcaatatactgcatcgacgcaatatgataatgaattgctgcagcaattggacgataatcataatcatcgatatatttaggataaactaaatatagatagaaatttagaaactgctcacacaatgaatataacgaaggattatcatcttcaattccttcagataaaagatttaagatcgttccaccaacttcttgattcaaaactaatggagcataacttggattaattccatattcaatccccttttttaccaaggtcatttcttcatctatttcttgatcaatcatcaattcaatgagtaaactcttagcgaagctaggcttattttcatctttcaaaaaattacgaatagctggtaataggcgccgaatattaattccttccatttgttcaattgccatatacaataaatcctcattaggcaaatctttcatcaaaatattttccatatcatccaaactaaaagcattattatgccgttccattccctcgtttgcttcacgtttagctaacagcagttcatcatgagcagcattaaagattgcttcatattcatacggaatatatggcattgataattcttctaccatgatattgattgcttcttcaaactcctctagttcctttaaagtagccacataaatacttacaacatcataataggtattacttgctttcgcttttgctaacattccttcagctttagccatttgatattcacctaaaccataaagacaaacaagacgctgataccgcgtcatttcgtcatccatatcattcaatagatcaagtgcatcttgaaattgattattagctatatattcttcaatcatattttctccttaaaaatgatgtatcgaggatacatcactattcttcttctaaatcaaattcataatccaagacatctgtagtttcttcttgttcttggagactttcaatcacttcattataaagttctaacttactatcctttaaaaaatcatcatctgtcaaaggcataatcatcactccttacaaacgtaattatagcaatactttatcattttgcaatcgaaacacctcaaataattcttcgtagtagtcattaaaaacactatttttacgccagataaaattaatatcatgttttattgttaaagcatttactttgacttgcttcaatcttctttcagctaattctttttcaacagctaatttatagataaaagttattccatgattatttttaacaagacgtttgatcatattaatattaccaatttcaataatattactaaaatcatcaatatctaaattccgctcttttaaccatcgttcaataatttctcgtgaacctgagccattttcacgaataattagattatacttaaataattcactaatatcatggactattgacaatggaaaatcaattgaaccaacacatatatattcatcttgacaaaattttcgataatcatactctaatttattaaagtatccttcaactaaagcaaaatcaagttgtccttcattgatcatctttaataactcacttgtatttgcaacctgcatcttaatcattgtgttttgattttcatttaacaattgatcaatcactttaggcatcacatattcccctactgtaagtgttgctccaaaaaccagctcttgtttcaatgacaaattatttaatttatttttcaaaaaaatatcatcatgctttaatgttgtagctacatcaagcaaaatttttcctgctttagttaattgcatctttttaccaatatacataaataacttaacatcataatattcctctaaataacgaatatgacccgaaacagctggctgagtaatatttaaatactgacttgctttagtaaaattcatatatttgcataccgccaaaaaagtatcgatccgaaaatctaacattaaatcacctcattataactataacatattattatcgttatataaatatatataatttttatttattgtttgatttatgtataataacttcgacaaagggggattagaaatgtcaaaaataaaaaataatgctttaggagttattctatgtctagctattgcaatgccagcatactatctcggtaaacaactgccattgattggcggtcccgtatttgccattttaatgggaatgatcattacattcttagttaaagataaaagcaaagttcaaagtgggatcacatatacttctaaaaaaatcttacaatacgccgttatattattaggatttggtatgaatttaagcgatattgtaaaaacaggaagttcatctttaccaataattatctcaacgattgcaacttctctagtcgtagcctatgtactatgcaaagtattaaaaatgccatcaaagatttcaacactgatcggggttggttcatcaatttgtggtggttctgcaatcgctgcaaccgcaccagttatcgaagctgacgatgaagaaatcgctcaagctatatcagtaatctttttattcaatattcttgccgccttaattttcccaactttgggcggtatgctaggattatcaaatgatggttttggactttttgctggaagtgcagtcaatgatacatcctctgttaccgccactgcaactgcatgggatggtattcatggaagtaataccctagatcaagcaacgattgttaaattaacaagaacactagcaattattccaattaccttagtattagcttttaaacgtactcgcgatgctgaaaaaagtgaaagtacttttaatctcaagaaaatttttcctttctttatcttattctttatcctagcttctgttattacaacagtcttcaacctgcctggtaatattaccgcaccaattaaagatcttagcaaattttttattgttatggcaatggcagctatcggattaaatacaaatattgttaaacttgtaaaaagcggtgccaaaccaattttcatgggattttgctgttgggtggctattactgtggtttgtttatcaatgcaagcactattaggtttattttaaaatgacgaatattcgtcattttttatttttaaaacgccaagttatttacctttatccatctagacaagcaatatatgcgattaatttcaaacgctctggatcaattacttcatttccatatgcttcataaaataaatcaccatatttatcattacctagattataagcaagtgaccatcttccccaaaacaaatcataatggcgatcacctactcccgcacgtcccatatccaaaaaaccgcaaaaacgataatcttggtctaaaaaaatatttggcaaacaataatcaccatgaataactgtatcttcaactaaaatatcctttttagcattaatataactaaacacctcgtcaagttctaagcagccaataccttgtgtcatttgctcatctaagttggcttgttgataatttaaaaatacacgttttaatatttcttcattatgatttatagatatagcttcagtaaattttgtatcatggaactttcttaacagctttcccaaagttactgctaatatctctggattagaaattagttttggggcacagctgcacatacctgacattctcttagttaataaataatctcgctcactactgctatattctagcgccgcttgactgtaattatacttactaaaatatattaatgcccgatactctgcctctaattcatgtttttttccaatttttaaataataatcttgatagcagtaggttttggcaccagatctcccacttgtatctaaaaatagttcgggagattttctaaataactctagcaaactcttaatatccatataaagatcacctgcctcttttaaaaatcatctttttttattattatatcaaggttattaattgtttcaattaataaaaatagagtaacgtcattagttgaatccctctactcataacgttaactctaaaatctattattacgcttttatttacttttaatgtcatcaatgatgattccatcttcaattgtaatgatgcggtctgcctgataattcactaataaaagcagtttttttatttttaatatcaagcaattctaaaacctcatcaatattgtattcctttgtcaaaggtgaaattcaagaacaattagtactttattcacaacttattcacatttcttaataaagctataaccttttttataataatcatttttcttataaaattcatgtgctcgacgacgttcaagtccgctattgactgtgatggcacttacctgtttgctcagggcgtattgttcactatacgcaattaaagaacttccaattttttgcccttgatatctatgttctactgccaacgcaataattctcataattttcccttcaatttctaacccccaacctaacatcaatccaattatccctactactctgtaatcgataattgcaacataaatttgatagtttgtatcttgaaacatttgatcaagtcgccaacaaaatttattaaattccaagttttggtatcctaattcatatttaactaattgatacacgtcctgataatcaacttcctctattttacgtattaacatttaataatcccccttcttcctacagtttaaacccccttaaaattttaagcaagcaaaaaggccacatgttatttacaatgtgacttttctaaccatcggtatgcctcaatgatccaacaatgaggaaataataatagatcgtggtcaaactgatattttatatactgataacaagctgcttctaaagaatcatttaatgccatttcaatattctttttaaacggtggttccccaggctgatcccaagctagtttatcagcaataaaaataatcatatctaatttactaggattagatcttagtgttgtatgtgattcgattgcctttaaaattgataaattcctaatttgaaaatactcataagctattaaagcagatattttttgatgcaataaaaatggatatatcttttctgcactatctaattgccattgtaattcattagcaattttcatcatatcttggggagtaataacagcactaatatcatgtaataaagctgctaaaatacaggctctaatatcttcttgatattgcaaagctaatttttctgctgccatagccactccaagaacatgctgatatgttctctccttattattaagcaaataaaaatcttttatttgttcttcaatagtttgattccttagtggagtttgaatgtaatttaaatccatcatagttacctttccatttaatagccaatattaattaacaagttatatcttctaaaactgtttttaattgccttactccatttgattgagacgttataatagcttgtaaaattgtttttaattcagaacaaattggatattccaaagttgttttcgccattgcaatagcaccttcatgatgtggaatcatttcattaataaaatttacatcaatgtcattactgcatgatggctcagccatttttgtgaacatagttcctacgataatatcaagcctattttgataatcatacaactgttcttgagaatttgtctgattttgacaatcacataaaattctccgcatattctcaatacttcttgtttgttcttttataatgttaaaagcaatattttgtaaagcttcattcttagtgtattttaataaattacatgacattaaaattgccgcacgatgatgcgggatcatttgaaccataaaattataagatatgctgcacgacaattcaacactagtcattttattaatcatttgatttaaaatacagtgatactcatctaaataggattgaagtttttgttcataacaatacaaattttccatctgctcatctcctatttatttatatgcatcatgagcatcaaatgttccttttatataaaataaaaaagctccaaaccattggtttagagccatttttaatcaaatggcgtccacgaagggattcgaacccctgaccgcacgcttagaaggcgtgtgctctatccagctgagctacgtagacctctctctcttgactgctcatatataatagcatatctaaaagagatgtgcaagcattttttaacaaaatatttgtttaaatttaacttctatttttccctggtcaactagaatagtacaataagattttccactcccacgacgaggtaaagtggttgaaccaggattaattaaataaaaacccgtcacctcatcacattgaggaacatgggtatgtcctgataataatacatcacaaccatgtctcagcaaatcatctaccatcgcttcttcacgtttataatatccataacgatgcccatgagtaactaaaaatcttactccttcaacttcaaaaacaacttcatcatcaaaaggagccatccaatcgttgtttccacgaacacatatccagccttttaactgctcttcacgtgcttcactatcaccacaatgaacatagtaatcgccatcaggttctaaacgttgtacttcatcgatcatcttatgataaccatggctatcggacattactactactttcttcatatttatcacctgacattattatacacaattaaggttcaaagttaaattacattttaattcggttgtctacttcaccatttacatcttgaactgggtctatctcttgattatctacaaataatgaaacttttttaacattttctaaatgactagctgatttaacgattcgattatacaaagtattatcaatcgattcattatcatttaaaatattagcagctaaatgaattgatagtgttccatcttgtaacgaacattgatcaactaatgataatggtttatcataatccatttcatttaacatgattgatacttttgtatcaatatcattttcatttgtttcaattcgtttagttacaggaacataatattctttgttattgatagtctctgtattataaacaacaactggtgttgttttataaatataattagtgcttgcttcaaaattattgatacccaactgatttgtaatacagcttgctggtactgtactattcggtaaagtactaatatcattaccatcaatttttaaatttactttttcaatatctccgttacaaaaaacataagaaaacatttcaaaaatgtcaagtgcttcctgattactgttaacatacaaattatcacttaaatcaaaggttaatgatttatcattaattgccatggcattcacttgcaggttcgaatctaagataggatgtaaacctaaatactcgtaatcattagacttcattacctcaatcatattacgatattttgtatcatcttcaacttcagcaccaaaatctacttcaattggaactaatgtgtttttatcgtctctaaatacaactgtttgataatttgctgtcatcgtagcagtattctttttttcattcctattattatcttgtttaatacagaaaaagcataccatcaaacaagcacaaatgataataccattacgtagttttcttttcatccaatcacctcaatataataatatgaagtgatcctcttaaaagaccaaataaatattatatatttcttatttaataaaaataatttcatcaaaaaaattagtcggattataaaatcacgactaactattttataataatatgttcaacaaccaaatctgtataatcaaaaaaacctgttgatgattttaaaaattcatcaactctacctgttgtataaatcttaataaatttatttttattaagatttaatagattatttttaattaaaacatctcgaacatttttacaaacagcatcactgctggaaatatattcaatatctggtaaaatatcttttatttgattctctaaaatgggatagtgcgtacaacctaaaataattgatttaatctttcctgcataagaatccaaatactcatgcaatacatcataaatatcttttttatccattccagcctccactaaaggaactaacttaggtgttggcaacgtaaacacctcaattccagtctgataacaatcaatcgtatctggatacttatgagaattaatcgttgctgctgttgctataacaagagtattatcgactccgcgactgataaaatcttccactgttgcatcaatcactccaatgatcaagacttccttataaacagcttgcagttcatttaagaccgtagcactagtagtattacatgccaagacaatcaatttgacattttctttaataaaatactcaactatttcacttgcataactaaatagttgttctcgtgttttttcaccataagggcaatgataattatcaccaatataaataatattttcattaggcagcaaggtcctgatagaattcaagaccgttagaccgcctacaccggaatcaaataccccaatcgctctttccatagttactcctcgtttgcgttatattcttctaaagctaaattttgaacatgtaatttagaagcaatttctttacctacatacctaaatgttgtagagctatattcatgatttgtcacatcaactttatcacttggataccgcagtataaaaccatattcatggcaatgattgatcaaccacttatatatgtcagtttgatcaaaatcagcaatacttatttcccttttttgaagatttatagtggtcccaagctgatattcgttatagcccggtaagatcccgctactacctaaagatgccacatcatagctgatataagccgctgttaaaaccatatcattatatccatcatcattaagtgcccgatacatctccattaaactattatttgcatcttcttgaagatacatagaatatttgactcgaggtattcctcgtatctcaacctgatttttcggttcataaccacctatatatgtctcgttattgacaaccaaagctaaatcacttgggttataaattcgtttggcattaggctgcaaatcatgattaaagagcgatgctaatgaacccttagtaaaattattactcagcaatttaacattatcatataattttttaccttctaaaccatcaaactctttcataattgataaataagtattagtatctgcaatgtatgtataatcaccctcatcataaagtgaccgtaacaattggtaataatcaatattatcgaaagaaaaaccttcttgattaatataagcattgactaaatcattttttattagtgtattgcatcttgatagtgcattactagcaaaagaaacttccaatttacttgccagctgattaccaacattgatcaaatcactatagtttgaatatttatttgttctatttaacgcattataaaattcataatactgtaatttaaactccggaaattctatatatttaataaactgatcgactgcaatcgcattttccactaagtaatcttgttcttcatcatctaaatacatctctattaaagcgcgattatcattattaattccattaacccgataaaagcgatcatacttgcggtttattgaaataaaagcaatcgtaaaacaaagtgttacaattaaatataaatgccatcttttcaatttcataatatcaccttgttccattatataccaactagtattaaaaaaccataataaaaggaactagattatagttctaattccttaaatttaatcaattcaaaaactgcttgaatccttgaatcgacacctaatttttgaatcacattagaaatatgattacgaactgttttttcactaattcctaacgttttagcaatatctctcgttgactgattcttaattaaaagattaaaaatttccttttctctaggagtcaggattatattcatctttacgttcacctcatactctaatatatgagaaaactacttttcggtgtctgcttttaatacattaaatagatttaatgctacctcatgtggtaaaacacgttctaactgttccagttgtgcttcttttagttgttttacactgccaaactctttaagtaacatttttcttcgctttggtccaattccttctacactatctaaaatagattgaaataaagatttagaacgaacatttttatggaaactgattgcatagcgatgaacttcatcctgcattcttgtcagtaagaaaaataactcactttttcgatttatttctaccacttcaccactactatctaacaagactgaagttgaatgtctatcatcctttgccagaccacagaccataatattaagatttaacgcatcaatgacttcttttgccactttaatttgccctttaccaccatcgacgataattaaatccggcttttctagcccttccattaaaacacgataataacgccgataaattacctctttcatactggcataatcatccggtccttcaactgtcttgatcttaaatttacgataatctttttttgatggtgttccatctttaaaacaaaccatccctgcaaccgcataagccccctggatatttgagttgtcaaataattcaattcttcgaggcaattgaatatttaatatttctcccagctgcttgattgctccaattgtagaagcttcatttttttgaatcaataaaaacttcttttctagttgttctttagcattttcatttgccattgctactaaatttgctttatttcctttttggggtttgataattttacaatttacaatttcttttaataattcaatatctagttcttggggcaccagcaactctttaggctcagtattttcttgataaaactgtactaaaaatgagataatttgttcttgatagtcatcctgtgcaggaactagatttaaatcacgagctaataactttccatttcgcataaagaataactgcaagcataaatatcctttgtcactataataacctacaatatcacgatcaactaaatcattaaattgcacatgttgcttacttgtcacatgctgaatatgagtgattaaatcacgacattctttagccaattcataattttgtacctcactggcactcatcattttattttgtaaatcattaatgatttctttcgtatccccttgaataaacttcgtaatacttgatgtcatttccttataaacttcatcactgacctcttgaatacatggtgcaacacattgattcaaggaataatataaacatggttttttaggaatatgattacattttctcaatggatagagccgatttaacaatttaaatgtttcacgagccgctgtaccatcaggaaacggaccaaaatgtttatgttttttatcttgagcattgcgaacaatttttaaacgtggatgcttttctttagtcaattgtatatatggataatatttattgtccataaaagagatattgtatttaggactatagtctttgattaaatttatctctaataataatgcctctttttctgaatccgtaacaatataatcaaaatcaacaatttcttgaactaactttgttgttttataattatgtgctccaacaaaatatgaagaaacacgattttttaattttttcgctttaccaacatatataactgtattatctttatctttcattaaataacagcctggctgtaacggtaaaagcgaaagtttatctttaatcatctgacgattcattattcaaaatatacaagggttgccccaagtcctccttcattaggcccaccatcccggtagctaacaacattcttgtttttatctaacattttacgaactccatttcgtaatactccggttcccattccatgaataatccgaaccattgtataattattaacaattgcatcatctaaaaatttgtcaacgattgccattgcttcttcataacgtttacctataatattcaactcatagctttgatttgttgtttttcgcaaagattttagatttgatttaacttttttaggcttcactttcttagaaataaagctaacttcctcgggctttgcatttaattttaatccactcatattaatagttaaaattccctttttattaattgaaagaatttccccctgacgattagctgataatactttgactacgtcaccaacttgatattcatggacttcttcattaataactttttttggttcatgttttaataaatcaagatttctcttagcatcaatgacaacatgttgttttaaaacagcttgttgttttaaatcttctaccactaaatcaatttcctgcttcgattcctcaagtagtttattagcttccgcttttgccttttccatcatttcatctttatgtttttcaaaactgctaattaagcgttcatatttattcatcttaacttctgtttcgtttgttaaagcttctaaacgatctttttcaatttgaacctgagctagttcattttgcagtttttctaataatttatctgtatctgtcagactttcttctttgatttgataagccatatcaacaatttcttgattaagacctaatcgcgatgaaatttcgatcgcataagaattcccaacactgccctcaatcaagcgataagttggctgcatcagttcttgatcaaattctactgctgctactaaaatataatcttcatttttagcaaattcttttaagcctgaataatgggttgaagctacaatcaagggattgatttgatgtaaatatcttaagattgcttcagcaatactttgtccttcacgcggatctgttccagaaccaatttcatctagtaaaactaatgatttttcagttacttcatttgttatttcaactaatcttttcatatggctagaaaaagttgacaatgattgttcaattgattgttcatcaccgagatcaacacaaatttgatcaaacattggaaccgttgctttagtacaaggcaaagccatagcacacagtgccatcacacttaataacccagccgtttttaaaacaactgttttccctcctgtattcgatccactaatcaataacattctctttggtgcatttaacactatatcattagctacaacatcatgtggctcaattaaaggatgtctcgctctaatcaagctaaaatgctggtagtcttcagccacttctggaactattccatctattttgactccataagcagcctttgcgaaaataacatcaatatcaatcattagttcttggtcttcatgtagaacatcataatggtcttttacattattcgaaagtacggttaagattcgatttacttcacgtcgttcatcatctttagcatgaactagctgattattcatttgaacaattatatcaggttcaataaacattgtttgtccgcttgatgaaactgcatggacaattcctttaattaaatttttattgccggctttgacaggcaaaaccagatgattatttcttgaagaaatagcttcttgacttaaataatctttattagcaacttttacttgatcaatttttgttctaatattatattcaattgataaaatttggcgtctaattcgtcttaattccgaactagcaccatctaaaacatttccactactatcaatacagcgattaatatcagctaataattgtttaggtaaaactaacgcattgcataattgcaacagctcattgtctaccaattctttttcgctcaaatagctttgtacttctttgacattattcaacaaataaacaatttggacaaaatcttcaccgaataaagtaccatcttttgttgtttttaataataacggttcaatatcaataaaatgaccgattggcattttcccgtatttaaaaatcagtttcattgcttgatctaaatatttttgttccagcttcaaatcatcagtatcttttaacggcattaactcagctatccttgttttccctaatgaactaacacaataagtactgattttatttttaatttgattaaattctaatgtatcatatatatttttcattctattcactcactattatcttatttaaaatttttgtttgatcaaatttagctgaatctaattttgataatacatcaacaacctcattatattgatcttgatttaacgaaataggctcattaacccgatcgatttcatcataatattttattaacgctgattcaaggtcttcctgattaattaaaccatgtttataagcactgttcaatgaagcagcaagcgcagcaacgtttcgggcatcaaaactatcataatttatcccatcattaataatattagtaaaaacatcaaacccgtctgataatgctttcatttcttcagtaactgaaggtacaagctctaaaattttgcttgctacaactgttttctcaacattctcttttcctcctggaataattggtgtaattacaaaaattaaagctaaataaataatgatcgttccttcaattaagctaactaacgctcctaaaagatgatcaagatgctcaaaaatactaattgtatagattatattttttaatattggtttaataaatttaccaataattaataaaataacttttaaagcaataaataaaataataaatataataaatcgatttattgtcttaccaacaatttccccaatcccttcaactttatatatttgatatattgctgaaagcggtgaagaagcatatagtgctgcaagcaacgatactactgttgccatcaaatcatatactcgatatacaaaacctttaaaatagccaaaaatcaacattagcaatagaataaaaacaataactgtgtcgattgccatggaatttagtgcaaaattcattaaaacacctcaatttcttttaatatacattgtatcaaaacaaatttgtactgtcaaaaagattagaaatatgatatactaatttagtaggactaggaggacaagtaatgaacatgaatgtagttagaaataatagttcaaaaagaatcaacattattaatatgcatgcttacgataaacttgtagcttttagcgactctagtatggccgacagtagcagtgccttaaacgacgctagtaaatatactaatattagtcatattggatgtgacgagactggatctggagatttctttggaccattatgcgttgttgcctgttatgtagatgagcgcgattttgactggttagtcagtatcggtgttcgcgaccctaaagacatggacaacaaagaacttgttcgggttgctaaagagattaaagatcgtcttatatatagcttattaatccttgataactctcattataatgcaatggccaaagctggaaataacctagctaatattaaggcaaaactttataaccaagctgttactaatgtaatgcaaaaagtaagtatgccaattaaaaacaaactagtcaatcagtttgtttctcccaaaacgtattataactatttaaaaagtgaagtgatcgttgttaaagatctaacctttgtccaaaaaggcgaagaaaaatatttagcaattatatgttcaatgattttatcaaaatatgcatatttacaatattttagtaacatgtcacgaagtcttaaaatgaagttaccgcgcgggaatagtaatagcgttgatgccattgctattgaagtagctaacaaatatggcgctaagatgcttaataaagttaccaaaacaaacatgactaactttaaacgcattaaagatttgatctaggataacatggttatccttttttattattcatttttttaaaataaatatacaaaaaggttgtcaaaacgacaaccttatttaacttcaatcacaaaaggctcaactttagtatattttacacctgctgcatctaacatccttttagccgcacgatcgctgtcagtccctttatatttatcatcttcataaacaatttcactaataccactttgaataatcgcctttacacactcgtgacaaggaaataatgaaacataaatacgacaaccttttaattgtcctgtactatttaaaattgcatttaattcagcatgaacgacataaggatatttggtctcatacaaatcaccttcacgcacttcccatggaaattcattatcttcacatccccatggtaaaccattataccccaccccaacaattttatttgcttcatttacaatacaagcacctacttgggtatttggatcctttgaacgaaaagctgataatttagcaactcccataaaatattgggtccaattaattactttactcatctttcaattcctcctgtaactcatctaatttagcttggaaataatcaggtaatgggctttcaaattccatatatttttgtgtggttggatgaataaaaccaagtttttttgcatgtaaaaactgtccgtgactaaaatcatccttacgatacccatatttaggatctccataaaccggatagccaatataactcatatgtactctaatttgatgtgtcctccctgtttctaatcgacactcaatcaaactcatagcattatagcgctttaatactgtaaaattagtaactgcttctttactgtttgtccgtgtcactgccatactttgacgatctttaggattacgcccaattggagcatcgactttcccatgttcatgaggaataagtccatgcactaatgctacatatcgacgaacaacagtatgatcctttaattgttttgatagtaaacgatgtgcattatcatttttagcgaccatcaagagaccacttgtttccttatcaattcgatgaacgattcccggccggttaacaccattgattcctgaaagatctttacaatgaaataataatgcatttaccaatgttccgtgcattattccagccgatggatgaacgatcattcctgttggcttatcaactacaattacatcctcatcttcataaacaatttttaaagaaatatcttccggttcgatatccaaatccacattatctaaaattgtgatttcaatttcatcatttaattttgttttataacttgctttttcctttttttgattaaccagcactaatccctgattgatcatatcttggatctgcgtccgtgataactcctgtaactgcatcgcaataactttatcaagccgtaaattattatcctcttcaattattaaattaattttttccatgaatgtactcctcaaaaacaatctcaacaattatcaatgctactccaatcacaactgccatatctgcaatattaaaaattgggaaattataattgaaaataattacatcgataaaatctcggacatatcctaaaaagattcgatcaactaagtttccaatcattcctccaaaagtcaacactagaccaaaacgtgtcaacacttcctcactttttgtctttctaaaaaatacgatcatcacaactgctgcaataatagcaacaacaataaataaccctaatttaccagcaaacatcccccaggcaactccagtgttatgagcataggtaaaataaaagaaattatttatgatttcatgagactgtcctaataacattgatgatgatactaaatgttttgtaaacaagtcaccaccaactactaatatcaatgtaactaaatataatattttatttttttttgttaaattcattatttttatcacccaccgacattatacaataatctaaaactaaccacaagaaaaagcaccactgctcatttagtaaaaaattaataaacttctcagcttaaaattactgtttcattgatgatagcagttttagcaatattaacgactttgattaagtttttaaaacgtgtattcctgaaacttaataggtcacttactactcttgataatgattaatgtgattggtgccaaagctacttgtaaatcttcttttatatatttatcattgacatttcttttcattattaacattttagtaatttctaaagtttgaattatatttttaataatgttacttgagctgtttcaatcctaaattcagattgcatcttactacaattatcaatactggtttcaattacttttaacgcttcaatgaaataattattcatctagctttcttttactatttctattggcgcagtcaattcaatatgattaccttcagaatcaattatttctacaacccaattagtacctattggagttaatggaaaacataatttataagagctgatttttgcttttaaaacttctttattaagaaactcaatactaggtaaacaattactgccaaatatatgttcttcattcatttttttataagcaaataaaccaagacggaaaccattaatatcaaaaatactatatatttcatctttttttgtcactctttgttcaaaaaactgttcataaaaactaactgccctatccatatcattgacacataaatacattgattcaatcctacaattcaccatttcatttctcctccctttaaaataatgatcattattttaaacttttactgctcctaatccccttgttatatcactctaattctaccactgtaaatactagatgtcactttataaaaaaagaacaaattaaatttgtcctttacaataaaatataaatgatgactgccaaaaaatgaaaagcagagccaatcattacaaatatatggaacaattcgtgaaaaccaaatgttttaaaccaatttggcttcttcacaatatagacgattgccccaattgtataactaatgccaccacaggcaattaatcccaagcaaccaagcggaaccttactaaatgcgggtaaatcaaaaatcagtgcccatcccattaataaataaaaaatagtagaaataaatctcggtgcattcatccaaaataatttaatgataataccaacacaagcaattgcccatattgctgccaaaaaataaatactatgcggatactctaaatatgacaaacaaataggagtatacgtaccagcaatcagtacataaatcatcgaatgatctagttttcgtaaaatcagcttaattttattatcttcattcgcgttataatagtgataaagacaactggcactatacaaggcaattgacgatagtccaaaaacaataattccaattatagttaagtgatctgacccttcaataatagcaataataatcatcataactagtgttgccaatgataaaacagcaccaataaaatgcgtttcactactaactggatccatcgctttttttaaaaatctcatatctcaacctccttaagtagttttaataaccatattatgtatttatgatatcattattataagatatgtcaaccatatcttgaaacattaactcaaatattataaaatatccatgaggtgattttatgaatcaattagaattatcagaaataattgataaagttgtaaataaaagcgatttaaccacaaaagatattccatcattagatctatatatggatcagattatgactttgtttgatgaccatcttcaagacaataaacgctttgttgatgataaattacttaccaaaacaatgatcaacaattattctaaagccggagtaattaaaccagtaaaaggaaagaaatatacaaaagagcaaatcattggaatgcttcttgtttataacttgaaaaacacgattactattcaagagataaaacaagttttggctcctgtttatgctaatgatgaatcgttagaaaatatttatgatcaatttattgaaataaaaaagtttcaaagcgatcaattaaaaccattagtattgaaaacagttgaaaattttaatttagatattgataatgataaccaaaggttgattagcatcatggctttatcatcattgtctaatcaattaacaaatatcgttcaaggaatcattgataactattatattgaaagtgagtaacaaggggttttagttgactagacctcttgtttttcttataattaacgtaatttatttaaggagagactacacatgaaaattattgatttattacaccggcgaccaactttgtcgtttgaaatctttccccctaaaaatcacgatggggatataagctcaatctatcaaacaattgatgaattagcaaaacttaaacctgactttatttcagttacatatggggctggggggtcaacaactgaaaacacggtagaaattgcatctaaaatcaaaaacgaatatagtattgaagcagttgcacatttaagttgtattgatgcgacaccagaacagttaattcgcgttctagattcattaaaagctaacaatattgaaaatgtcttagctttacgtggagattatccaagaggatacgatccgatgaaggctccgcactattataaatatgctagtgaattaaatgattttattagtaaaaattatcctgatactttttgtttaagtggtgcatgttatcccgaggtacaccaagaagcagcgtcattggaagaagatttaatcgctttaaagaaaaaggttgatgctggagcagaatatttaattacacaaattttctttgataacaactattattatcgtttggttagagaagctcgaattagaggaatcaatgttccgattattgcaggaataatgcctgcaacaaattcaaagtcgttattaaatattgctaaattaagtggttgtaatattccttataatttatcagcctcaattgagcgtttcaaaagcaatcctcaagcaatgaaagaagttgggatgaactatgcgacaaatcaaattattgatttgatcactaatggagtagatggaattcatctttatacaatgaataaaccggagactgtacatgaaattttaaaacgaactagtaatattttagctgagtttaaaaatgattaaagaaaatgctttaaaatatttgggctatttagataatcaagtagattctaatactgaaattcttttaaatgaatgtcttaaagaattagaacaagtaacacccaaattcatgtatcaaatatacaccttaactcatcatcccttaactataaaagaattaaacttaacgattaactatcccgatttaattgatttatttgacagttgcgatagaatcgttataattgcctgtactttggggttacagctagatcaacagttacgttattattcaaaaataaatttaacgaaaatgactgtgatggatgccttagctagtagttatattgaaattaaatgtgatgaatatgaagcaaagcaaaattttggtaaacggaccttccgtttttgtccgggatatggtaatgttccactcgaattaaacaaaaatcttgctaacgcattaaattgcagcaaacatattggtttgactgttcaagaaagtaatctgctgctaccgcaaaaatcaatgatcggactaattggtcttggagatgaaaaattgactaaacattgcttttcatgtgttaataaagaaaattgtatgtatcggaaaagaggacaaagatgttacaagaaagattaaaaaatgatattttggtttttgatggtgcgatggggacgcaacttcaagatgctggacttaaagctggtgatattccagaatgtttaaatattactgaccccaaactaattcaaacaattcacttaaattatttaaatgctggtgctgattttattacgactaatacttttggggcaaatcctctaaaaatggcagaggctccatattcttatgaagaaataatcaatgctgcaattgataatgcgactattgctcgtaagacagctgaccgtcaaaacgatagttatattgttttagatattggtcccattggtcagcttcttgaaccaatgggtactctaacttttgatgaggcatatgaaattattaaaaaacaagttattatcgctaaagataaagttgatgctgtattattagaaacaatgactgatatttatgaagtaaaagctggaattttagctgttaaagaaaatagtgatcttcctgtatttgttaccatgacatatgaaaataatctgcgaacactttccggctgtgatcctttaactatggtcaatgtcttagaagggttaaatgttgatgttttaggcgtaaattgttcattaggaccaattgaattaacccccatcattgaccaaatcttagccgcagctacaatccctgtactgctccagccaaatgctggccttccttgccttgttgaaggtaaaacctgttacaatatggataaagaaacgtttgttcaagaaagcttaaaacacgtaaaaaatggggtagcaattatcggtggatgttgtggtacaacacccgactttatcgcttcactaaaaaataatttacctgttcgtaagaaaattaccccaaaacgagccactcgggtttctagcggaacgaaaactgttgaatttgggcatcatgttgtagtttgtggggaacgactaaaccctaccggtaaaaagaaattaaaattagcattaaaagaagaacgatatgatgaattagttgtagaagcaatcaaacaagatcaagctggagcccatgttcttgacgttaatgttggtcttcccggtattaatgaagttgcgactatgaaacatgtgatcaagttacttcaagaggtaatttctttaccactacaaattgatagttctgttcctggagcaattgaacaagcttgccgttattataatggtaaacccttgattaattctgtaaatggtaaagatgaaacgatggatgcaattttcccaatcgtaaaaaaatacggcggggttgtcattggattgacgttagatgaaaatggtattcctcctcttgctaaagaccgctataagattgctaaaaaaataataaataaggcagcttcttatggtattaccaaagaaaatattattattgattgtttagttttaactgtttctgctcagcaaaaagaagttatggaaacggtcaaagcagttgcaatggtcaaagaattaggtgttcatactgttttaggagtaagtaatgtctcttttggactgccaaatcgtcctttattaaacaaaactttcttagctatggctatgtcagctggtctagatctcccaatcattaatccaatggatcaagaattaatggctacaatcgatgcttttaacgtattatacaactatgatcatgatgctgcagtatatattgaacgtcgtgccaatcaagaaaccataacaaaaaaggacacttcaacatttactttaaatgatattgttcttcatggtttaaaagatgaagttactaatgctacaaaagaattattgaaaacaacacctggtttagaaataattaataatattctcattcctgctttagataccgttggtaaacagtatgaaaaaaatataatctttttacctcaattgattcaatctgctgaaacatcaaaaattgctttcgggataattaaagatacttttaaagatactgctgctacaaaaggaccaatcattatggcaacagttcatggagatattcatgatattggaaaaaatattgttaaagtagtattggagagctatggctataaggtaatcgatttaggtaaagatgttccaccagaaactgttgttgaagcttttcataagcatcatcctaaggcaatcggtttaagtgcattaatgactaccaccgtagtttcaatggcaaaaactatcgaactattaaaacaaatcgataatatatgccctatttttgtaggtggtgctgttcttactgctgattatgctaaagaaattaatgctgattattattctaaagatgctatggaagcagtagaactacttaataagataataaaataatccatcttaagatggattattttttcgtctatcaaaaaattttacaagttcacaaatcacagtagttgataaacaaagtcctacacaaattccccattgaacaatgtttaatggttgcaatttaaaaatcgcacttaattcaggaattgctaaaataatcacttgtaacaataaccctgctgctaatgctccccataaataaggattattaaatagtgttcgatttaaaatcgaagcactacttttaacattaaaagaatgcactaactgacaaccacataaagtaataaaagccattgtcatcccaactgtatgatcttggttattgcctattgcataagcaatcaacgttagcgttccgatcattaatccttgccaagcaatagtaaaacctaaaccatgcgagaaaaatccttcatctttttggcgtggtttacgatgcattactgttggttcagtcggttccattcctaatgcaaatgctggtaaactatcagtaattagattcacccataacaaatggatcggtaacaatggcaccccaaaattatgtggtgttaacaatgagatcaacgaagctccaaaaattgtcaatacttcacctatattacttgataataagaattgaacatcttttttgatattatcaaaaataccgcgaccttcacgaattgatgtaataattgtcgcaaaattatcatctgtcaaaatcatgcttgcagcaccttttgcaacatcagttccagttattcccatcgcgcaaccaatatccgctgctttcaaagctggtgaatcattaactccatcaccggtcatagctactactttacctttggatttccaagcattaacaattcgtactttatgttctggtgcaactcgtgcataaacagaatactcttcaatatgctcagctagttcttgatctgacatttttgccaactcacttcccatgattgctttttgaccagattctaaaattccaagacttcgagcaattgcacttgcggtaataacatggtcaccggtaatcataatcgttctgaccccagctgatttagcttctgccactgcctgtttagcttcttcacgtgggggatcaatcattccaaccatcccaataaaagttaaattattttcaatcatttcactggtgaattcttgtggttcttcatcccaatatctaattcctaaagctaaaaccctcagtgcttcatttgacattgtttcattaactacgctaacctcatcaatgtctaaattattgcatcgcgcaaaaataacatcaggtccccctttagtaatcgaaataatcttatcttcatgtttaacaaaaactgtcatcattttacgctcagaatcaaaggccagctcattaaatcgaggatataattcggctaaaccatctttggtaaatcctttttctaaactagctttaacaagagcagtttccgtaggatcaccaactgcaacttcctttcctgcaacagtagaaatactaccatcactacacaaagtaaaataattcaataattgattagtctcttcactacaagtttctaataattcaattttgcgattataaagatatgtttttacaactgtcattttattttgagtcaaagtccccgtcttatctgagcatactattgaggtactacctaatgtttcaactgctggtaaacttttaacaattgcattctttttaaccattcgctgaacactcaaggcaagaactacagtaacaacagttgccaacccttcaggaattgctgcaactgccaatgcaattgatgttttaaaagcctcaagaattgagagaccttccaacagttccattccaaaaacaacgatacaaataataatacaaataactcctattgttcttccaatttgatccaattgatcttgaagcggtgtattttcacgcttagtctgctgaatcatcgttgcaatctttccaacttcattttcttcaccagtcgtggtaacaattgcgattccccgtccatatgtaacattacaagaagcataaaccatattatttcgttctgctaacgggatctcttctttatcaagaatcgagctgattttttcgacaggaacactttcaccagttagtgcactctcatcaactttaaggttaaaacattccactaatcgcccatcacttgcaatacagtcacccgcttcaagcactaacagatcccctggtacgacttgactggcattgatcgtaataatattaccctcacgaataaccttagctttaggactcgccattttttgcaaagcctctagtgctctttctgcattattttcctgaactaagcctaaaatcgcattaactactaccacaaaaacaatgattgcactatcgatccattcagttggttcaacaataatgctgacaactgcagcaataattaaaataatcgttaacgcatctttgaactgcaaaaagaatcgaactataatagattgttttttagtctgttctaattcatttggaccatattttgccaaattctctgtgacttgctgttcagttaagccactttttaaatcagttgaaaattcctgggctaactctttaatctcacgattgtaatacataaatatctctcctttttctaaaacattatgcaaaaaacgagactatatcgtatttgcatacaataaaagtctcgttgtttaattacgatacggatataaaataatatcgagttgacggcatcgtaaacctaatggctaactactcccttttatatatacttattttatcattaagcgttttaaaaagcaactaatacaataattcttgatcatcaatattattcccaattttccatatttaatcctaattaatgcatatttctgcctctccagcaatcattagaacgactattaccattattaataacaataatatttatttttcgacgttttttatatacttctaatttttccatacttgcaattgcacttaaccgtttatgaccatcttgacaataaaatttcccttgttctaaacttacttttaccggaaatgacagcccaattcgaacaatcgaatcatacattccttgagtatactcctttgtttgaaaaaaaacctctgttatatctacctgctggatcctcatcaaatattctcctcatttaaactaaaatcacgataagttaagtcctcacgctccttaaatccttgactctgccaaaaatcattacctagctgattgtccgcaaaaacaactaaagcagtcttattaattccctcagctttaaccgctgacaaacattcttttactagctgcgtcgcaattccctgaccacgataatcacttcgcacagttgtatgataaatataagcacggcgcccatcattaccagcaaggatcaccccaacaattttattaccatcactcgcaataaagtttgttgtcggattgcgttcaagaaatttagcaattccactacgactatcatcaagatttctcattcccattcctttggtattcatccaaagctcatacacatcgtcgtaatctttaattgtcattactcgtaccactatcattacattttcttctcccaaaatcctttgatttttaattgaaaattattactaaaatattctagtttatgaatgtcttcttcactcatagttatttttaaagcagccaaagcactatcaatatgcttaactttcgttaccccaataattggaacagtattttttgccagagcataagcaatagcaatttcagcaacaccgacattatattttaatccaatatttttcatttctagaatcaatggttcaatctgttttaaacgttgcttactaaaagccctggcacgtcttgtccgtttaggaaagggatgattataattgtaatatccagttaatgccccttgttctaaaaccatgtaagcaaaaaaagtaattccttgttcttcacaatatttcataatcccattttcttcactgttacgatataataaactaaaatgattttgaattgccgctaatttaagacctgcattctttaaaattagctctacttctttgatttgtttcaaattatgatttgagattccacaatatcgaattttattagccttcattaatggaataatttctttagcccatttagttacattggcaggtcgatgaatccaataaatatcagtatctgctcttttcaatcgactcagactagaattaagtgtccaagacattgatttacgcggcagccaagatgtcggcataaacttagttgaaataagaatatcttcaccgttagatagatccccaattattttttcagatgaccctaaactataaacaggcgctgtatcaaaaagcgttagcccattttttactgcataatgatatatgggctttaattcttcaattccatgactaacaccaaaaataaatttactcccaaatggtccttttccccaagcccaagtgccaatagcaattggaggaatagtcaaatcttgcatttctatctgtttcattttaacctccttatgagataaaggacgcttaaagcgtcccctgtttagttatatatttcatcacttcttcttgatcactaaaatgatgtttccctgttttagtaatctgataatcctcatgtccttttccaagaatcattaaaatatcattatgctttaattgttgcatccctttaataattgccttttggcgatcaacttctatttcaaaattacttccagaaagtccattagtaatatcatctaagatcatttgaggatcttcactgcgcggattatcacttgtaaaaattacataatcactatgttctaacgccgcttttcccataattggacgtttagttgcatcacgatcaccaccacaaccaataatggtaataatacgaccatttttaaactcttcagcactttttaatacattgatcaccgcatcgggagtatgagcataatcaacaaaaatactatttgttccatatttaagcaattccattcttcctgctggtgcctttaatttatcgtttaaagcaagtatatcttcgatttttacacctaacttgtttactaataatagagcaattaaataattataaatattatatcgccccaccatatttaatctagcttgatattcatgatttaaatattcaaatttaaatattgttcctaaatgtgaaaagctcatttctaaaattttaacatcactatcatgttgaccaataatgatattattgtttgattctaaaacaaaatgctggtaatgttcatcatcaccattaataatagcaatcttatcatttctagtcttagtaaatagaatccttttagcattagcataattttctaatgttttatgatagtccagatgatcttgagttaaatttgtaaaagccacctcatcaaattctaaaccatgaatccgatctttatcaagggcatgagaacttacttccatgacaaaatactctacaccattttccttagcttctaataacatattataaagcacatcgacatcaggagtagtatttaccatcggctttttcacatcaccataataaaatccgattgttcccatataagcaacattctttttcaacatttttaaaatctgataggtcattaaacaggttgtcgttttaccgttagttcctgttaatccaattaattttatatctttaatcaatggataataattttcatataaatatgtttttaaatattcacgagtgctttctacgattattgtttcaaccttgtaacttccatgttctgcaataatttttgtcgcaccgttggcaattgcttgttcaatataatcatgtccatcacgcgctacgtttgggatggcaataaatgtatcacctggtttaactgctcgtgaatctgtttttaaagctacttccactttacttcacctcatttagttctattatagtataaataagtctttgaaaaaagaaaaaggatagaaaatttacttattttctatccttataactacttagtcaatatatccaacgcattatttatataactttagcgatttctaagatatttaataaattgaataactggtaaatttgctaaagcaagaccatatactatcattaattgttcaatatttaatgtttgaactttaaacattgattgtaaaagcggcattgttaaaacaagtgtaattaaaataaagccgactaaaaatgcaccttgcaaatatttattattaaaaaatgattttttaaataatactggtgatttagatttacagttataaccatggactagtcttgaaagacataatgttccaaatgccattgtactagcaagtaatgcactttcttgataaccgatcataaatccaaccatcgtcattacagcaataacaaaaccttcaattccaacacttgctaaaaatggttttgttaaaatagattcattcattggccgtggtttttctttcataacacctgcattatgaggttctagccctagtgcaatcgctggcaaactatcagtcaataagttaataaataacaagtgtactggagcaaacggtactggcagagccattatcgaagcatacaaaactgctaatattccaccaaagttacctgataataaaaactgaattgcatctttgatattagcataaacatttcgcccattttcaaccgctttaatgattgttgcaaaattatcgtcagttaagaccattgcagctgcatctttagaaacttcacttccggtaattcccattgccactccaatatctgcttgctttaaagctggtgcatcgttaacaccatcacctgtcatcgctacaatattaccctttttttgccaagcacgaacgatccttattttatgttccggtgaaactcgcgcataaactcgcttatcttcaacatatgtttttagttcttcatcacttaaaccatcaatttcactaccttcaacagcttgtgaaatatctgttaagattccaattcttttcgcaatcgcagctgcagtaatcttgtgatctccggtaatcataattggagtgattcccgcttggagacattctgttactgctggtgcactttcaactcgtgggggatccatcatcgaaatcagacctaagaaaatcaaatcattttcatcatcataatctaaacttttttcagcagttaattttttataagttatcgctagaacacgtaatccattttgtgagaattccatattcatcgctaaaatatcttctctatcttgtgccgttattggtacgatttgattatttttacgaatatatttaatccgttcgatcaaaacatcaactgccccttttgtaatcatcgtgtacccatcttttaataaatgaagggttgacatcatttttcgatcactgtcaaaaggaatttcacttaaacgtggatatactgcccgaacacgacttgctggtactcctaaatgagcgcttaaattaattaatgccgtttctgttggatctccgatttcttgaccatcaacatttgatgaatcattacataagatacttaaacgcatcaaatctttatgcaaaggaatacttggatcaatctcactagcatcaattcgttttccttcaatatagtaatcttcaacagtcatcttgttttgggtcaatgttccagttttatcagagcagataatagaaacactgcccaatccctcaactgcttgtaatttacgaataattgctccttctcgagccatcttttgagttccaaaagataaaacgattgttacaattgaactcaatgcctcaggaattgcagcaacagctagtgcgacagcaaacataaaggcatctccaacattaccaccttgaaggatattaataccaaataacaatgcacagaaaaccattattataattgatagtttttttccaaaattatccagattaacttgaagtggtgtcttcttttcagaagtagatttcaataattgtgcaatttttcctacttcagtttccattccaattcctgttactaaaaaattaccacgtccataggtaacaaaactcccggaataaaccatatttgtgcgatcacctaaagcaacttctccagtgattagatcagagcttttttcaacggcaacactttcaccagtcaaagcactttcatccaccttcatactagcattttctaaaatacgtccatctgcaggaataaaatcaccagcttctaaataaacctcatcaccgatcgttacttctttactgggaatttcaataacttttccatctcgtaagactttagcacttggtgaagataattcttttaaactatttaatgattgttctgctttgactgtttgaacagttcccaaaatagcattaatcgtaataacgattaaaataaccagcgtactttcgatatcacctaatactccagaaataatagctgcaaaaattagaataattactaaaaaatctttaaattgttctaagaaaattacaggtatactctttcctttagtttcaattaactcatttaaaccatacttttcttggttagctttaacttgttcattagttagtggctttaatgaaccatttactcttttgcggacctccgtcttggcctcattgtagtattctttcattcattttctccttttctcaacacaataaaagcgagccctttattgcatacttaaaatgcaataaaagtctcgctatttcattacgttccggatgatttaaaaccatcgtattgacgaaatcgtaaacacattgtgttagctactcccttttattaaccataatattatcctctactcattcgaaagtcaatctttttgtcgatataaaacaatctttaacgaattcttaacaattttaagattataagttccagacggatatgtttcaccatcaatattgacctgctgtcttgtttttaatgttaaataaggtaatttttgatgataatagagcttcccttgttcaagtttgcccgctaatagtaatgttaaataataaggtatgtatcgtttgtgaagacttgaaacaagattaatatcaatcattccgtcatcaatttgagcttctttaccgattttaaaaccacctccaaaatattttccattacaaaaagccccgacgattaaattcccttcataaaattttttaccatcttggaataaagcggttggaaacaaacaatactgagttattcgccgaactaatacactggcatattgcaaagaacgaggaagatattttatttgactatatttatgaacattatttgcaatatcgctatcaaaagcacagcataaaacattaatacaataaatatcattagctttaatcaaatcaatttctgatgccgctaacgataatgatttctttaataacttttctggatcattttcatcagcaatcgtacggacaaaatcatttcctgttcctgttggaataactaccagttcattatcactccccacaagtccctgaactatttcatgaatcattccatcaccacctactgcgtaaattcggtaattgcatccactataacttttagctaagagagttgcatggcgtggataatgtgtatatttaatctcataacgatatccctgcatcactttaacgatcatcgcttcaatattcttattattttgatcaggtttaataataaatatatgtttcattctctcacctactttagtatattctaacaaattttgataaaaaacgtcataactattatcatctttttttaaatgtgataacatatgctaaaggagattgctatgaagaaaatattactcatcactgttgtgacatcactaattggagtaaccggctgttctaataaaacaattgctgaagataaagctaaaaaaatcgcattgaatgacgctgaagtcagtgaagcaaatattacttttacgattcaaggtaaagatcaaaatggatatcactatttgtttgaagatgataattacacttatgaatatgaaattgatattcatgatggaacaattgagaataaagaaatcttagttaaagaattttctcctctcaatgattatgataagatcatcagtagtgatgaagctaaaacaattagcttaaattattttaatttcactgaatcagatattagtaacttaaacattgagttagataatgacagtagcaatatctactataacatcagttttactaaagataagcatcactactccatcaatattgaggctgtaaatgggattcccactaatactaaaacaacaaaaagctcttagatttactaaagagcttttttattcatatcatcatgatacatccgataactagccaaaccatcctgcttagctttgtataaagcaatatcggccttcttataaagattattgaatgtcgtaccatacaaagggatcatcacaaacccaatcgataatggagccataatttggtactcctcaatcaaatatggtattttcatttgtcttgtgacatcttctaatttcattcggattgatatttcatcgatattgcgacatagaatcataaattcatcgcctccgagtcgacacaagatatcatcatttctaaacatctcttttaatcgtttagcagttttagtaattattttatcaccaatagcatgaccgtaattatcattaatttctttaaaatcattcatatccagcatcaataatgctccgcacgtcatttcgttactaagcaagatctgattgatttcattaatagctttagaccgattatataatcctgtcaaaccatcatgttctgctttatttttcaaagccaattcttgccgtttttgtttatcaatatcaatgacatataaatagcaaaaaatatctttattttcctgcagatcaaaaatatgataagttgcctccatccaataatactcaccatcaacatatcgtttatacaccacagaattagttgtagtaccttgttgatagcgagtgagaattgcctctaatcctaagacttctttaactttatcctgatattctttttgaataatcttttcagttatgctattgatatagctgctataactgctgtttataaaacttaaatcatcctcctgtatattagtattaataattcgattttgacttaaattaattgacaactcataaaaagatttttcttgtaatgcttctaatgttttagcattttctaaatatttttgaaatgatgatttctcaagagtaacatctttaaaataacctactaatttcaaaggacggtcaccgtaatcataaatagtttctccgactactttgatccaaataattttactattaagcgtaagcggtaattcataactaaatttattctgtactgtttgagcaatcagctgttcccttattttttctttagtttgttcattcattacttcaatattattgattttatttaaataattatcaataataatatcttcattccttggaagatctaatatttgataaataaaactatctctctctaaattcattaaaatcagctgctttgtttgataatcatactgccaaatatttagatttgccatttttataacgcgatcaagaatttgtgatgacagccaaatctcctcttctttttgtttcattgatgttacatcatttaatacaaacaaatatgttcgataaccattttcagtatttaaatattttgttttggaatccatccacaatgttgtttgttccaattcaaatcgataaatcgcattgtaatcttctttattatctaccgctttgatatagtcatctttaattgctgcataatcatttttattgatcaatccgcagtttccaccttttttcattgcttcgatacacgattgttttgtatatccatatttttctaaaataccgattgaaatcatatttatttctggattttcaaaatttggaggagcatctctcaaacggattaaaaagactacggtcatagtattatcaataactaactgattattttttcgtgcatttactacctcggtaatattaataaagtcaccataaaaatatggtcttccagccttgtcttcataataacttgcaatcatttgaatataagcaatactcccatttttatgttgaacacgatagataacatctaatggtcttttttccctataggctgcctcaaatgcttcattaacgtaatcaatatcacgtttatcaattaaatcatagctccgctttgtcagctgacaatattcttctttacaataacctaacgatgttgataaattactgctaaaaaattcaatatgattaggtgtcatcataaaaatatctccaggcgaattatttactactgcctccagatgattttttagttctacacgttcggttatattaataacgattccacgccaaatcaggtttccttgatgagcaacaagttctaattgattagttacccacatatatcctgtactactattaattcgatacatcaaattaatcgatgtactcttacctgttaatttatcagtaatcttatgacgatcatcaggatgaatcaattgtactaattgattgttatagctagtaataatttccacttggctaaaaccaacaatatttaaaaaactttcactaagatagtcaaattctaattggctgttgtttttacaatgaaaatatccacctaacgtacattcatttaaaaatgaaagttgttgtttttgttttattaactgttgattaattttttctaactcgatttttgatgacattgtttcattaatatctacaatcgcgcagatataagctaatagtccgtctttagctttaacgattcgccctttttcttgaacccaaagccaagtctgatcttttttcataattcgatatcgaacggtatattcaaatccttcatcttcttctaatccaatggctgcatatactgtttgatgatcttcaggatgaataatgttaataatttgccctttacaaaaaagattaaactcttccattgtagtaaggttaagtagactcaacatttcccgattaataaaataaatcggcaattccttggtacgataacatcctaaaattcccgcaggaactacttttgaaaacatcgaaactgctgtttgactatcttgataatttaaataatcttctacagccgtatcttcaggaaaacctaacaattgattgattgtttgttttgatgctttaagctcttgttcttgcaaattattttttgtaacatcgttcatagcaccataaaaaatcagacttttatcttgttttcgtaagaaaaaaactcttaaacttatccatgaaacttttccttttaatgaataataacgaatcgtagcttcactaccacttattgggttttgataagcttgatcaaataaactaataaattcattttgatcatccggatgtacaaattcaattattctatctcgaatattttcaaaatccgctggattaattttagtaatatgataaaaaatatcatttactttaattatcgatattttatcctctgaaacttgataaaaagcaatcccgcctaaaatattatttaacattgcttcacttgatatatcattaataaaaatatcttgtaatctaacttgatcaacctgctttaacattatccctcgataatcaacaaggtcagaattactgataatagcttcaaattcctgaactgataaaggaggataaaaataatatccttgaccatagatacagcttaattcattcaacaaatcaatttgctgttttgtctccacaccttctgcgattactcgtaaacccatcaatttagccatttttacaattgcctctaaaattccaatcccacgcccaatactgtcttcacgtaattcgagaaatttcatatcaatttttaaaatatcaacatttacatctttaagcatattcaatgaagaataaccacttccaaaatcatccattagtacagtaaatccagctagtctaaaatcatctaccacttttgaaataatttcataatcactcgcatatgagctctcagtaatctcaatttcaattaaatttacaggtagtttatattcagctacgagttctttaaatgtttttactacatcaattgcataaatatctgttctagaaacattaacggatactggtacaccttgatttccttgatcaagccaattactcaacaaacggcaagtttcttgccagacaaataaatccaaatttacaataaatccatttttttctaaaataaaaacaaaatcccctggtgaaattattcccttggttggatgattccatcgcactaatgcttcaacacctacaatttttccattcaacatattacattttggttggaaatataccataaattcatggttataaagggcttgttgggtatccattaaaatactttggctatattcaaaatcttgtcttatattgctgtcatagtaagcaatttgttttgtataattttcttttattgaacttaaagcgattaaagcccgatcatacattgctgcaacgtattcaccatcaattacaatataaattccaaattttggaaagaaacctggattaacagttactacttttatatgggcgattaaatcagtcaataatttatcaatcaatggtcgttcatttggcataatgacaacaaaatcatcaccaccaaaatatcctgctactgttttaaattcattttgtatcttttgtaattctaggccaatttgccctaatattttatttcccatttgacgaccataccagtcattaaataatttaaaatgctcaatatctatcgcaatcaaacaatagttatcattacctccttcttctaataaaaatcttgccgctttcaaaaaactatgctcatttaataaaccggttgtttgatcatattccttatagtttgtactttcaacatttatcggagttaatcccccatcttgaaaaaggcacatgtaaacagtatcactaaattgtcctttacttattgcaatcaaaataccattgatccaactgtattcaccattatttaaaagtctcctaaaccttcccataaccggcttaaaatccccatgattatttttcattttattaaataactgcaaaaaatcattttgatcatgtggatgaataattttctgagcgatttctctgatttgcttactaaaactacctgataatgctggaataatatatttatctttacgataaaataaaatattataagtatctcttgtaagattaatttctactaattcatcatataatgctgattctaatacaggacttacagaattaatatttactctttcaagtgtataaatatagctggcttgatcattgattataaagtcctctttgataactttaaaatctgtcttttgaattgtatgataagatactttatttatctcatttattacagcatcccctagttttgttttataaccaattttttcttcattaaataaattttgataaaaatcattcatgtagactagtttattatgacaatcaatgatacatactgctttagcactaagacttaccatacataattacacctactttctctttataacatttaggatattttaccatattctaagtaattagtagagaaattctgttaaattcatcatcattagttaataattcaactggtgataaaatatgttttatctatttaatctttttttaggttttatttttgtttatcttgattccaataatatagatagctgcttgattaaatatctaactatttttaataattttctttacctactcgttaaatctgtaaataaaacagcccttctagcaagtctattcacctgcattgctgactactttttacttttcactaataatcagcttgctggagtactatgctttatcattgttcaaagcaactatatgaagcttttagatcaatatactttttttccttttgtcgcaatactcttatggcctgttaatcctcttattgctttagcgtcaaattatgcattactaagttcacacaatctttattacagttttaaatcacgttatcaatcaaaacatcaatattatttatttatagcaatttttcttttattatgttgtgatttttttgttgcacttactaatatcaatctaccggtccctgctgtatttagaattttgatttggattttatacttacctagtcagttattcttcagtgctagtcaaattatttcagaaaaatagttttttaatatttattttttagagtaatgatgatataatcatcaagtactgtcctcatagtgaaatggatatcacgtaaccctccggaggttaagttgtaggttcgattcctactgaggatgccatgaagtctataaaccgctttctagagcggtttttattttatccaaaataataaatatattttcaaatctagaaaaaagacccattcaataaatatcatactataacataaaattaaacagacaaatatgattttgataaggagaatattatgagaagaaaagatagagagattacagattttaatgaaatcattaacattattaaaaaatgtgatgtttgtagaattgccttaaatgataaagattttccctatattgttccactcaactttggattggatatccagggaaaagaagtatatttatattttcattgtgccatggaaggaaaaaaattagacttgattgcgaaagataaccgtgtaacatttgaaatggattgtgatcacaattttattctttatgaagaaagaatgagctgcacaatgggatatgaaagtgttattggtcatggtgttattgaaactgttcccgacgagaataaatatgaatcattaaagattctaatgcgacaatatcatgccgaagattttaaatttaataccgatatgatgagggttacaactgtattaaaaatgacagtaatagacatggttggaaaaagaagaaataatatacattaaaataatagaaaaatatagaattcaaaaagtataagttaaaatagtaaacttatactcttttactttgcttgataataaattttcacctataaaaaaactgaaaagttgtaacatagctacaatccttcagcttttaaaataccataaaatatattaaaacaataattcctaaaatgattcgataccagccaaatgctttgaaatcatgttttttaatatagctcattaaaaatttgatcgttaacatactgaccacaaaagctactagcattccaatcactaataataacaattctgctgttgtaaaagcaaaaccaaatttaactaatttcaataaactggctccaaacattactggaattgctaaaaagaaagtgaattctgctgcaacagttcgactaactccaatcaataaagccccaacgatcgttgctcctgagcgtgatgtaccaggaaataccgcagcaatcaattgaaagattccaatgatcaaggctgtattataagtaatttcacttaatgaattgatttttgtttctttacctttgttgtaattttcaatgaaaataaacagaaccccaaaaacaatcaatgcaattgcaactgtcaaaggattgtaaaacaactcatttaattgatcatcaaacaaaagacctactacagctgctggaaggcatgcaaaaataattttaaaccacattgaaaaagtatccttctttattctccatctatttttataatcaaaaggtatcaactttttccaataaagtaaaactactgccaaaattgctcctagctgaattacaactagaaacatttctaaaaaatcagcactaacatttaatttaataaattcatcaactagaatcatatgtccagtactactaattggtagccattcagtaataccttcaacaattcctaaaataataactttaattaattcaataatttccatactctcctccaccaattatactagtgcattatagcactatcttaactaaattacattaaatatattcttaagattttattaatatgatagaatatacgcagaggaaaaatgaaatgaaaagaaatgtaaacataattgtcgtatttaatcaaaataaatcaaaagtattaatgtgtaaaagaaaaaaagctccttttaaaggactctataattttgtcggaggaaaaatcgagccaaatgaagatcatcttcaggcagcatatcgtgaattagccgaggaaactaatatatctaaaacagatattgaactgatccattttatggattttacctattaccttgatgatacccttctagaaacatatattggtaccctttcaaccaatgttgatattcacggtgaagaaaatcagttagcctggatcaagctaactgatgattttaaagatcttaatcgttttgcaggaaatggtaatatttaccatattctcaaagaaatatcactaatgatgccgttctaatgtatatcctcggccactaacttcatcaaccgttgctactaccataaatgcaacaggatcaattaatttaatctgttctttgattttggttaatttaaccggtggaataattgttaataaggttttagtgtcagtctcattaaaacctttttgactatataaagaagttaccccagcatccgcttcttcaataatcatttttttgatcatttcatggcagtcgctaattactactaattgaaccatcttagaaccttttgttaaagttttattcaacataaatgatgttacaaaaacaagaacaatactgtataagattttagttggattactgaaggttgcttgcatacataagataataaaatcaaatacgttaaccataatgaatactggaattcctaattttctattcaagataatcgcaataatatccatacctccagatgatgcatctgaacggatcattaatcctaccccaattccaactaagcagcctgctaaaacgactgctaataaagtatcttgacaataattatggaaaattgcattggtattgaaaaattctagcaaaacaggaaaagcaaatgttgatataagtgtagataaagcaaattttttaccaataaaaaataatcctaataaaaataataaaacattaatgattcctacgataagtgaaatatttatcccagtataatgattagtaacgattcctagaccagttactcctccagaaattaattgattttctaaaaccagagtacttaccgcaaaagctacaaaaacatttcctaatataatagttccgattcttaataattttcctttcatattatcacctcggggtataagatagcataattatttaccaaagaatgtaacatatgctacaattaagaaaaaaggtggaaaaaatatgaaaatagcagaaaatctctttaattactttaaaaatacaggtacattgatcaaatatcagcccaacgatattatctatatgcaagaagattcaagcaacaatctttatttgattttaaaaggacgtgttcgtgtttatttaatttcaaaagacggacaagaaatcactttagatatcatcgataaaggaagaatctttggcgaatcttcatttttattaaacacttcaagaccagtttgtgttagtgctattgatgaagttgaattgatctcttgtaatcttgaaaatttgtatcctgccattttagaatcaaaagaactaactatagcaatcatgcagctcttatcttcaactaatgatcatcttactaaccaagtaaaaaaagcatatttttataaccgccatgaaaaaattgctgcttttttattagaacaaaagaaaaagactatctcatacacacatgaagaaatagcctctttaacaggacttaatcgcgttactgttactaaaattctcaatgatttttatcaaaagggctggatcgacctagcctatcgtaaaatcattattgttgaccatgatgagttaagcaattatctagataaataatcatatttaagcaattggcaattttccgtttgataataaaaaatatcatcgttgctcatctcattaaaatacgtattaattgcccgacaaacagcaccatgacacactaataaaacattacttttggttgcctgttctttgatttcatcaagaaattcatagacccgcttgcataattcaataaacgattcaccattaggataccgtattgctaaattatgtttattagcaataaaaccaggatcatcacgatgtaccccctcatagataccaaaattaatttcactgattctcggttcaataatcacttctaaaccttctacattagcatagtcagcagtatcaatagcacgttgtaacggtgatacatataaaaaatcatatttaattgattttaattgtcgacccaattctttggcttgttcaattccatctgttgtcaaagcggctggactaattccgcaaactaaattattaacattataatttgtctgtccgtgtctcgttacataaagactcatttcattcacctgctttacttttatcactgtactcacaatgattttttcttaactaacggttattctactacaaataagtctctttattcaactaattatagtatattcttttgataaaacaaaagaaaagacaaggcccttgcttccttgtctaaatcgctaaaaagtttttattttttaaaaatctacttcgctgtcataatagcaagcttttaacaactcaaccatttcttcttgagttggaattcttggattagaacctgtacaagcatcttcaattgctagtgctgcaatattatcaactcgtgccaagaatacatcttcgctaacaaaaccagtatctgccggtaatccatcagctccataatgattgattgaatgtggaatatttaattcatcattcattttgcgtaagtatgcaattaataaagctactttttcatcatcactatttccacctaaatgcatataatcagcaattacaccataacgttttttagctgtttcatcttttgcattaaaggcaataacttttggcaagtacattgcatttgctgccccgtgaataatgtgaccaccttgatcaacaaaagctgcaccagttttatgtgccattgaatgcacgattcctaatagcgcattagagaatgcttgtcctgctaaacattgggcatcatgcatatcgtcacgagcacccatatccccattgtatgatttaactaaattagcttgaatcatttcaatggcatgaatcgctaatggatcagtgtaattacaattcgcagttgaaacatatgcctcaatcgcatgcgtcatcgcatccataccggtatgcgcaactagcttaagtggcattgtttcagctaaatcaggatcaacaattgctacatctggtgtaatttcaaaatcagcaattggatatttaattcctttttcataatctgtaatgattgagaatgctgttacttctgtagcagttccactagttgatggaattgcacaaaaatgtgctttttttcttagtttaggaataccaaaaactttacacatttcttcaaatgtaatttccggatattcatacttaatccacattgctttagcagcatcgattggtgaaccaccacccatagctacgatccaatcaggttggaactcttccatgactgcagcacctttcatcactgtttccacagatggatcaggttcaatcccttcaaatagttttacttgcattccagcttcttctaaataagcgatagcacgatcaagaaaaccatttcttttcatacttccgccaccgacacaaataatcgctttttttccttctaaagattttaaagcttctaacgaaccttttccgtgatacaaatctctaggtaatgtaaatctttgcatcagaccacctccataaccaaattatagcgcttacatatttagttatgaagagacaaaaaaggaatagccctatccctttttatgtatacctagatattaatttctttaatactacacttgattgctctaataaagccctcatcttctttcgacaaacgatatccttttctcgtaatcaacagatcttgataactcattttattttcttgacactccttagtaactaaattaaaacgtcttaaaacttcttgaggaatcggtgacacccacataaaagtatgaggtagatgatttaataactcaaattgactagcccgttcatataccgaaatttcttttttactatgacgtgtttcatcattacgattggttgctacgatcggtaatgatggtaaagctgtatccccatgtgtaatttctatttgggtttctagatcagatagataaataatctctttaaatgataacggattttcatttgaaaataataattgataattaaattgatatagtttttcaaaatttagttcctttgtttctaataaatggagaaaataactctcttcatcaataggaaagcgaattattccaatatttgcttctccttcataaacatccttgattgtatcaaaagaattcgtttcgcgataattaaccttaatatttttatcatgaaaattaatcatcgataaataattagtaaacgcattagcgacataactagcccgcggtacacatatatctaaatgaacagacttatcatcatatccttgatacatggcttccatctcttctacctgcataatgatacttttagctcgttcaataaattcagcacctttttttgttggaataactccttttgaagttcgttcaaaaataattatctgcatattttcttccagatctttaattgttttacttaaatgcggctgattcatatataaattgctggcagctttactaattgagccggcttttgcaacttcaatcacgtattttaaatgtaatagattcatcccaatatctccttagtgattattttaacatagaaaagataaattgtgtttatattctagcatatttatcaaatatatatttttttatctatcgctataacttacaaatatatggtacttttgacttaattgtatttaaagcgctttcaacttatgttataattaaatcaaatgataaaaaagaaagaggtgtaaaaatgaaaaagttgaaacaagaatatttggataaaattgacgaaatcgttgctaagcacaaagatgaaaaaggtccaatgaaacttatgcttcacgagattcaaaacgaattaggctatattccttttgaagcaatggaaaaaatttctgaaacaattggtgttccagtatctaaagtatacggtgtagtcactttctattctcaatttacaactgaacctaaaggtaaacatgttatcgccgtatgtttaggaacagcttgttatgtcaatggttcccaaactattctagacttactttgtgaaatgacgggatgcgaagtaaattctactagtcctgatggactattttcaattgatgcaacacgctgcgttggtgcctgtggtcttgcgccagttgtcagtgttgacggaattgtttttggatgtactaaacaattagaagatttaaaaatgcttgtcttagattatttgaaagaagaagccccatgttagttaaagagattgtcgatatactaaaagcgaaggaaatatatattgatgatcaagcaatctatcaaaaagactataaaaagggcttctcttctgatttaatgtcagatgctctagcattattgaaaaacgaaaccgaagaagtattatttattactggtctagccaacgtacaatctttaaggacagcagaagttttagatattgatacaattttatttgttagaggaaagccactagacatgacaattgttgatatggctaaaaatcttcatattaatctcttccaaactgatgaaacaatgtttgaagcttgcggcaagctatacgaggcaggaatgcgacgatgattaaaacttatcaagtagaaaaagataattatcaagatgccgggaaagcatcaagtgatatcaaaaggactctaaaagccctaggaattgaccgaaaaattctaaaagcagtagcgattgcttgctatgaagctgagatcaatattgcaattcattccgatggaggaacagttacttttgaaattgatgatgacggtattgttcatttagcttttgatgacattggtcctgggattgaagatttaaaccttgctcaaacacccggttattcaacggcctcacccaaagcacgggaattaggttttggtgccggaatgggtctttacaacatgaaaagtgtggcttctacctttgaaattacttcttcaaatgagggaacccacatcaagatgacattttaatgaagcaagttattagttatttaggcagtggttgtaaaaactgcattaaatgtgttaaatcatgtcctatggatgccatttcaattgtcaatgaacaagtaattatcgatgaagataagtgtattaattgcgacatttgtattcaggcatgtgaccagaaagtattaagaattaaaaatatcgatcttgaaagcaccttaaaaaaacatgattacaatattgcattgattcctactgcaatcttatctgatttaaaaacatatgatgagataaaaaatattgctcatgcaatcaaggagtttggatttgatgaagtagttcaatatagtgatattgaaggacttttatataaacagggtttaaaagatagtaaaaatggtgaagaagtaatgttaacatcattttgcccgacaattaataaactgattattaatgattaccctactttgatcgatcatttactaccatatgattatcctgttgagattgctgctaaaaaattacggcaaaaatacgcacagaaagatattgctatctattctttatgtgagtgtgttggaaaattaacacttgctaaacaaccttttggtaatgaagattcaaatatcgattatgccttaagtgtttcacaaatgtttccacggataaatcaatttaaaaatgattcacaagaagaacttgaaatcaatgaatatggagtaaaaagtattgttggtgatctttatggagataaaagactttcagcaatcagtgttgaaggattatcacaaattagaaaagccttggatttaattgaatttgatcaactaaaacatgtagatttaatggcattatttgcttgtttccaaggatgtatcggcggctattatttatggtctaatccttttgaaggctgctttaatattgaaagcatgatcgatgattgtaatggtaatttagcttcgttagataaaaaagattatatcaaagcacatgaaataacaagtggtaatgaaaagaatttcaaagaacgcttagcttggtttaataaagtaaatgctattttagaaactttacctcaatatgattgtggcagctgtggattcgcaaattgtcgcggtctagcttcacgaattgctagtggtgaggttgatgattcattatgtcgagtaaaaagaaggtgatggtatgaatatcaaagaaatacttcaactagaaatcaaacaaataaacaaagcacctttgactaatattgttgaaaatgtatatattggagatttgttaagttttgttatggcaaatggtaaggaaggtgctttatggttgactgtccaaaaacatttaaatgttgtagcagtagctgaattaaatgattttgctggaattatctttgtccaaaatagttttccggatggagataccatcgctaaagctgacgaattagaaattccgttatttattagtcagcttgatgcttatcatctttgtaaacaattaatttctttaggtctttaaaatgtattacgatctgcatattcattcagctctctctccttgtggcgatgatactatgacaatcaataacatttttaatatgtcttatattaaaggtctggaattaattgcaattactgatcataattctttaaaacaacaaaactacttagaagaaatcatcaatcatgaaatcttaaaaggcaagattgattatatccatggtgttgaattacagagtaaagaagagattcatattctcgcctactttttaaaagacaccgatttaaaaccgattcaagcatggatcgacagttatttaataaaagttccaaataatcccgattattatggcaatcaatatatctttaatgtcaatgatgaaattatcgatcatgaagacaatttattgatcagttcccttgatctagatatatatcaaatcattgagacaatccattcttttaatggaatagctgttttagctcatgtattagctaaaaaatttggaatctatgagatatatcaaggaattcccgatgatttagcttatgatggtattgaagttggtaatttaagggaattgaaagaactaaaaaaaagatgcccttctgtgcgttgtgaacatgtcttttataacagcgatgctcataatttagaagctatcaatgaaccagtcaatcaaattaataaagatgatttttatcaactgtggaggaaaatataatgcaggaaatcgcaatgaatattctcgatattgcttataactcaataaaagctcaggctaatttgatcaagatcattattcacgatagcagtaaattaaatattattaatatccaaattattgataatggcattgggatggacaaaacaactgtaaaaaatgttattgatccattctatacaacaagaaccactagaaaagtcggtcttggagtcccaatgtttaaggaaaacattgaagctactggaggaacctttaaaatcgaatccgaagttggaaaaggtactcatgtaactggtgaatttattaaaaatcatttggatacgccaccaatgggaaatattgttgaaacaattattactttaattcaagctgatgaaaaaattaattatttatttaaatatacaagtgataaattagaatttattttagacactcaagaaattaaaaaaattcttgagggtgttccaattaatcaaccagagataattgtctggttaaaagaatatataaaggagggattgcaactatgaaatccttagaagatttaaaaaaacttcgtgatgctgctcaaagcaacatgtcaatgcggacagatgaacaacaaaaatatcgggttgtcgtaggaatggcaacttgcgggattgcagcaggagcgcgtcctgttttaaacactttagtagaaactgttgcccaagaaaaattacctgcaacagtattacaaactggatgtattggaatgtgcactctagaaccaatcgtagaagtgtttgatcgcgatgacaataaaacaacatatgtattagtagactctgctaaagctaaagaaattgctgaaaaacacttaaaacatgatgaaataatcgacgagtatactgtcggacattataagaaataggaggttgtaagatgccaacaaaaagaacccaagtgttagtttgtgctggaactggttgtacaatcggtaattcaggtgagctaatcacggaattcgaaaaagaaatcaaagctcttgggcttgaaaaagaagttgaagttttaagaactggttgtttaggattatgtggagttggtccaaatatttctatctatccagataatatcatttataaaactgttcaggtttctgatgttaaagaaatcgttatggaacacttctataaaggtcgtccagttcatcgtttaatgttaaatgaatctgatgaagaaacaaaagagattcatgatataaatgatactaaattctataataaacaaaaaagaatcgcccttcataattgtggtgtaattgacccagaaaacattaatgaatatatcgggaaagatggctactttgccttagctaaagtagttagcgaaatgactccacaagaagtcgtagatgtaattaaagctagtggattacgcggccgtggaggtggtggattccctgctggagttaaatggcaatttgctttaaatgaacctggtaaagaaaaatatgttatttgtaacgctgatgaaggtgatcctggagcatttatggatcgttcaattcttgagggaaatccccacagtgttattgaagcaatggctattgccgcttatgcaattggtgctaaccatggatatatttatattcgagctgaatatcctattgccgtagaacgtttaaatacagctttagagcaagcacgtgagctaggactaatcggtaaaaatatttttgagagtggttttgattttgatttagaactacgtttaggagctggagccttcgtttgtggtgaagaaacagctttgattcaatcaattgaaggtgaacggggaatgcctaatccgaaaccaccatttcctgcccataaaggggtctggggaaaaccaactattattaacaacgttgaaacatatgccaatattgctcaaattattcaacatggtgctgaatggtttaggagcattggtactgaaacatcacctggtacaaaagtatttgcccttggaggaaaaattgttaatactggattagttgaagttccaatgggaactactttacgtgaagtaatttatgaaattggtggtggctgcccaaatcacaaacgctttaaagcagttcaaacaggtggtccatcaggtggctgtttgactgaagaacaactagatacaccaattggttttgatgaattagtaaaacttggctcaatgatgggatcaggtggaatgatcgttctcgacgaagacaactgtatggtcgatgtagcccgcttctatatggattttattgttgatgaatcatgtggtaaatgcactccttgccgtgtaggaaccaaacgaatgctagaattgcttgaacaaatttgtgacggtaaaggaacaatggaaactttagatgaacttgaattactagcttcaacaattcaagatactgctctatgcggcttaggtcaaactgctcctaaccctgtactttctacgatccatcaatttagagacgaatatattgcacatatcgttgataaaaaatgtcctgctggggtatgtaaagaattattacaatatgaaatcgatgaagataaatgtcgtaagtgtggtctttgtgctaaacaatgtccagttggagcaatcagtggtgaacttggaaaagttccatatgttatcgatcaagaaaaatgtattaaatgtggtcaatgtattaaagcatgccactttaatgtaattgaaagaaagtaggtgtaaggaatgtcgaaaataaaaatgactatcaacaaccgtgaggtagaggcatatgaaggccaaacagtcttggaagcagccaaaaataacggaatccatatccctactttatgttatttaaaagatgttacaggaacaggtgcttgccgtgtttgccaagttgaaatcgaaggtgcaaaaacattatgcgctgcctgtgtttatcctgttagagaaggactagtagttaaaactaattctcaacgagctttagatgcaagacgccgagtcgtagaattaattgtttctaaccactctaaagattgtctatcttgtatccgtaatacaaactgcgaattacaacgactttgtcaagaattaggagtccgcgaagatgcttttgctggcgaaaaaacagctcctacctttgatgaagtttcgcctggaatcgttcgtaatacttcaaagtgtgtcctttgcggccgctgcgttgaaacatgtgctaaaacccaaggtttaggaatcctaggctttatgaatcgtggtttcaaaactaaagttggtccagtttatgataagagtatgaatgatgtcaactgtatgcaatgtggacaatgtatcaatgtttgtccagttggagcgttacaagaaaaagaagaagtccataatgttattgcggctttaaatgacgacagtaaacatgttgtagtgcaaactgcaccagcagttagagccagtttaggcgaagaatttggaatgccaataggaactagagtaactggtaaaatggtccatgccttaaaattaatgggctttgatagagtatatgacacaaattttggtgcagatttgaccataatggaagaaggatacgagtttatccatcgtatcagcaatgatggagttttaccaatgattacatcttgtagtcctggatgggtaaactatattgaacacgaatatcctgaattattagatcatttatcaagttgtaaatcaccacatatgatgctaggttcaatgattaaatcttattatgcaaaagaaaataaccttgatccaaaagatatctatgttgtttctattatgccttgtgttgctaaaaaaggtgaaaaagaacgtgaagaaaacttaactgatggtttaaaagatgttgatgcggtattaacaactagagagttaggtaaattaattaaaatgtttgggattaatttccgtgatttgaaagacgaagattttgatcaagacatgttcggtgaatacacaggtgccggagttatctttggtgccagtggtggtgtaatggaagctgccttaagaactgtaactgatgttttaacaaaagaagacttaactaatttagactatcatgcagttcgtggtgaagaaggagtcaaagaagctagtttaaaaattggtgatatgacagtaaatgttgcagttgcccatagtatggttctagctaaacctttactcgaagaaattaaaaacggtacatctaaatatcatttcattgaaatcatgggatgtcctggcggatgtgttaacggtggtggtcaatcatatgttaatgctttaactcgtaatagcggttttgactggaaacaagctcgtgctaaagcgttgtatgatgaagacttagcattacctgttagaaaatcccataagaattcacaaattcaaaaattatatgctgatttcttaggtgaaccaaacagcgaaaaagcacatcatttattacacacacattatacaagaaaagaacggtttaaataattatcgttaggggggaatatatgaagaaaataattaaatatttattatgtttaatgatgatattcacgatgattgggtgttcaaatacagaaactaaagataaatccaatacagttaaaatactatgtccggcgggagctccgtcacttgcctttgtcagtgagtatgaaaatatcagtaaaaaaggaaaaatagattttgttgatggtagcgatcagcttgttgctgaattatcaaaaaatagcagtgattacgatattattgttgccccaattaatttaggtgctaaattgattgctagcgaacaaaccgattatcgtattcaaggggttattacctggggtaatttatactatattggaactagtaacgaagcattaaatcagactggcgaactgggtttattcggtgaaggtgcagttcctcaaaaaatcgttgatactgtaaaaattaatacttcattgactcctaagtactatcaatcagcaacattagtacaacaacaattattatcgggcaacattcaagttggaatgttagctgaaccacttgcaagtgcaacgattgctaaagctaaacaagcaggaattgaactttcaattattgctgatttacaaaaagaatacggtaaagatggttatcctcaagccgctatctttgttaaagaaaataacaactatgatgaactatttgaagcaatcgatcagttcactaataatgattacaatggattaaaagactatctagaaaaaattggtatcgagacattgagtttgccaagtgttgaaattacagttaaatctatcgatcgtcaaaatgtccattataaaaaagctagtgaatgttctgaacaaattaaagacttcttaaaattatttaacattgattataataaaaatatgttaagttcatgagacgtaaaataattactttaatattaattattggtttatggcaaggttttgctttatcaattgataaagcagtaatcttgcctttaccacttgtagtctttaaccaaatgttcaacctagcaactagtcaatccttctatatcgcaattggagcaactttatcacgtgttgctttaagtttctttttagctttaatagttgggaccatcttaggcgtttttagtggcttgtttaaaagtgttaatgaatacttagctccaattttctcattcttacaaactatccctcaaattgcctatattttaattttattggtatggtttaaaagtctgactgcattgatcatcattgttttattgatgattttgccagtattttataataatgctgttaacggtattaaaaacataagtaacgatttaaatgatgttacgattctctatcaccatccatttaaatttaatctaattcatgtttatctccctttaatcaaagggtatatcgtctcagccgttgaaacagctctaccacaaagtttaaaggtcggtgtgatggctgaaatttttgtttcctcaaatcaaggaattggtaaacagttgtattttgctagagcacaaattgatatggtcagtatttttgcctggaccatctggatggttattattattatgttaattacatattttactaataaaataattaataaagataaaaagtaaagaagtcaagcgatttgccataactagcgctaatcacacttctttactttttatcatctacaattatctgatcttttccacaacgttttcctttatataaacgatcatcagcacactttatcatagtatttaaatgctttgctttcatcgtatctgaaattccaaaagtcatcgttatcttaataacattaccctcataaatgaaagagtgctgccttaagagattattaaaacgttcaattacataagtaagttcttctttatttgtattaaaacataagaaaacaaactcttcaccaccccaacgacatatatcaatatcatcaggtatcttatctttcatcaaatttgctaaactatgtaatacataatcaccacataaatgaccataagtatcgttaataatcttataatcatcaatgtcgcctattacaatattacaatctaaattaggagatgaatttaaactatcaaatagataatgacgtgttctaagtcctgttaactgatcattatcagctatttcttgtaaattttcatttaatttatctattgcttttgaagaaacatcagaaataaaaacactgtatatcataacaataaaacaacaaactgcattaaatattgaaagagttaaaataatatttttatcagaaattatatatattggagcatcttgggttgaactgattattctaataataatataaataaacacttcaataattgcacataaataagcccatcttgaatttttaaatggccaaaaatatactagcgataccattgctaataagtacaagggaaaaccactttcccatccaagtgtaaaaactgtaattccaacaaatgtgataacctcaagatgtaccgataatactgcagttcgataatagcctttatttattattaccagcatgattccataaaaaataacactaaacagattgtaaactactaaaaaattaaagtttaataaatagaaaatacataaatagattagatgcataattaatgctaaagctacaatttgtaaatacacacttcgtacatagttactatgagcagctttccccttttcattcatctaatcaccttcgttcatctctattatagtaaatttataccatttttcatatataaacttaaaataaaaaggaacctaataatttgggttcacttcatatctctcatagacgatattcctttttattttgtagctattctataagaacagtttaatgatttcttaaatatttttctttaatatattcaattgtttcatctaaattagaattcgccaagcgttcaagcatatctctcaagattctatctgtattttcattaatcacataatagtgatgcgtcgtattataataatcaagtggtgctttaaaattaaactgagttccttgataaaccatcgttgcagcaacacggtcgcaaaacatttcaacaacataattaattggcatttcaatggcgataattcctttgctagtaaaatcgatccaatattcccaatgatgtttattacgtcctttgtgatgcagccaggcactgctataaccaatagtatcacgttcattactatttggtgatttatagcccaaataatatttagcacctgttactaattcagtccaagaatatttagataaatcatgttttaacccttgtttatacaaaccaaatctgaaacataatttcattacataaaatttatgttttgtaattgttttaaaatgcttaaacagtttcatttaattcactttctgcctttgaaatatcgtcactagtatcttcacgatatcgtgtagcaaatatatcctcttgttcatccacttcaacaatgtcagctagatctggtaattcttcaagtgttgttaaaccaaaagtatccatgaactcatcagttacaccatacaaaataggcattcccggagtatcctctcgcccaacctctttgatcaaggctttagctacgagcttacgaatcattgcatcgcatccaactccacgaatatcttcaactccagcccgtgtaatgggctgattataagcaataattgctaatgtctctaaagcagcattcgataaactagcactgctttgttcgaccatcttttgataataaataaagtaatcagcattagtagctaatttataacgtccgccaaaattaactagaacaatcccctttaaagctttattcccataaatttctgtaaattgatccattaatagcgttgcttcttttttacttatttctaatactccggctacttgtttaatatcaacaccatcatcaccagctagatacaacataccctcaataatatctaaataattattttgttccattaaactttcccctctacatatatttcttcaaataacccatcttgaataatctctacttctttatctttagctaaaactaatattgaaataaaagttacaataaaatagaaacggtcatgacggtcaaataattcctcaaatttaactttcttatttactcttgttttaaaataatttcgtatttgagctgttctttcatcaattgaaatatcttttttagcaatatgtgtatccagtggtttcatcattgcttttcgctgaaacattttttgcattgctttcattaaatcataaacttctaatccttcaggaatcattgaactagtatccacaacatactcgtccattgactctgccggtttaataataactgtttgacgctgttcatatttatcacgaatttcatctaaaacatctttataacgcttatactcgattagtcgtttgatcaaagcttcacgagggtcttcttgatattcatcattaattgtcaccttttctttaggaatcagcatcttacttttcatttcaatcaaatctgccgccatcactaaatactctgacatgatttctaatttagaaggatccatagcatgaatatattgcaaatattgatctgcaatcaaagacaattctaatttttctaagtccatttctttttccttgatcaaatgtagtaataaatctaatggaccttgaaaatcttcaattattacttgatattccactatcgatacctccttcacttcgattacgcatttgttattataacatatatattattgctttagaagtattcttttaggaccataacaaacaaaaaactatagcgtttaaatcacgttatagtctattatgagcctcttttcgtcttgggcttacgaataataaaattaagcatttctttgccatcaaaaggatatagaggatataaataagataccccaaatggttttaaagatactaaataaccaattaagatcacatgataaatgacaaaaccgatccatcctaaaaaaccaacaaaaataattaaaaatatttttaaatatttattagtaagcgatagctcatagttaggggttgcaaaaccaccgacatcaccaattgcacagaataataaaatttcttcactaaaaattcctaaatcaattgcaaactgtcctaataatacagcggcaatcatccccatcgcatttgacaaagaggtaggagtatgaatcgtagcaatccgtaacaactcaatcgctaattcaacaagcaagacttgtcctaaaaagactagatcaatagtccccttacttgtcaatagtagccataaaggtactaaataaatagaaattaatactgcactacaacgaattaatcgtataaaagtcccaatgattggtgtttgacgatgctcctcaacatgctccaatatttcaaataatgtggtcggcaacatcattactgaagacgatgtatcgcaaataatagcaatatgaccgtgaaggatatgcgtagctactacatccgggcgttcactatatcgaacaagtggaaatggattatatccttgatctaagatcatctcttcaacggcacgatcagacatgaccaaatcttcatttttaatttcttttatacgttgtaatactgtttccagcatagtttgatcaactgtgctatctaaataacataaacaaacatctaagggattatttttcccaatcgtctgtttattcataactagatcaatcgtacgaattcgtcggcgaatcaaacccgcacaagtcagcatcgattcattaaaaccatctttagagcctctgacgcttttttctgtctcgggttcttctacagaacgactaggaaagtgacgagtatctaaaacataagttttatcgcgataactaatcattgcacaaccagttaacattgaatacatggccttttgataatccggttcgtctttaacatcaccattatttaagcaatcttttaatgtttcaccacgatggttggtaattccttcaactaaataagcaattagatcatcagagcaaagactagaaacataattaattgtaactttttcattttcaaaatcaagcgttcgggtatttaaatcaaatgatggattgttattgatcatgattttggcttagtacaaattgcaactaaaaaagcaaataaaatagcactactaatacccgctgcggttaaatcaaaaatacccatcgctaatccaaaaacgccaaattctttagttgctgcaagcgctccatgcatcaacgaatgaccaaaacttgtgattggcaataatgctcctgcatgaaatatttcaactagtttatcatagatatgaaacaaatctaaaaaagcaccaataacaacaaatagactcgtaatatgtccaggagttaattttgaatattcataaatcaactgtgcaattacacagacaaagccacaaaaaataaatgctaatagataattcattattcaacaacctccaaactaaaggcatgggcaatacaaggtatactttgtttttgattagtcataaccggtgacaataatgcccctgttgtaatcactaaaacccgcttgtacttatgttttaacattttctgatagatgtacccaaatgctactaaagcactgcacgaaggcccactcccaccttgattaacatcttgatcactatcatataatagacagccgcaatcatcatactcattataggtaacactattttcattcattaattccttcataatcgatttcccataagttgataaatcaccagtaagaatcaaatcataatcagttccttgccggtttaaatcttttagatgattaactaatgtatcaaaggctgctggtgccattgctcttcccatgtcattaggatcactttggttcatatcaataacacgaccaatagttaatgcttctattctaacagcactaggattattatcaagaattacactgactgcacctgtagctgtcgttgtcattgtttctttacgttggacaccatattcaattggataacgaaattgtctttcagcggttgcattatggctgcaaacaaaacaatttgcattatgaatacaatgattttcaattaacattgaggctgtattaataactagccccattgttgcacaagcaccatacatcgccataaatggtctttgaaaatctttagcagtgtaattactggcagtgacttgattatttaaatctccacctaaaaagacattaatgtcatcttttttcaactttcctttttttaaagcatgactaatcgcatcttgaagcattgccatttctgctaattcataagatttatgtccaaaatgaaaatcagggtagtgtctatcaaaatattgacctaacggtccattaaattcgtcaatcccgcacgttgttcctgttgctctaacataaacattattcaactgcattgaactaccagataagactgatgacataacgaatacctcctaacacaaacgaagcaacaatcccaaaagtaatgactgttcctcctaatttaaacatattagctcctatacctgttactaaaccttcgcttttagcttctaaggcactagaagtcatactattagcaaatccggtaattgggataaaagttccagctcctgccttttttccaattcgatcatatattcccaatcctgtcaaaatagcagcagccaaaacaatcgtaataatcatcattggtgttgcttctttttcactcacatcaaaaatatacatgtaaaactctaaaatgccttgaccgacagcaccgataatgccaccataaataaatgcacttaaacaatgcttccccacttgtttttggggttttaaatcttcagcaatttcattatactgtgatgtattcatattattcacctcacaatattttttccatattaaaaaaaattaaacaaaaaagagtcaaaactgactcttataggcgttttaacactcttaaaacactatatcctaaaatgatatctactggaatcatgatacattctttaatgactcggataaataacgataatgtaaatggaattccatacataacttgtaaccaataaggcgttaacataaatgtaattaccatttcaactaatactaccgaaatcaaccacagattaaacaaatgatattcctgatcatttaatttctttttataataacgcataacagtaaacaagacacttatcatcacaatacaaaccacactaattattattttaaaattaagtgtaatgtctacaacattcttagaaataactacttgatctaaactaaatacataaaagcaagcccctattcctaaaaaaattaaaattacttggattgccttttctaaataattcatataattttctttaatcgtggcaactacaatggatggaatcaaacattgtaataccgcactcaaagtaaatcctaaaaaaggaaatcccgttggtgtcacaattaatccaactaaatcaacagcaagaccaattatataacaatatcctggtgcaagcattatccctgctaaaagcattgggattacttcaattgagatttttagactctcaaaaccaaacaaaggtatcataatcgataacctttttaaaatagcggctaaaacaataaataaagctgctaatgtgagtgatttagtatcactcttaattggaaatttccaaaatacaaaaattccaattaaaactaaaataattccgcaaataatttgaatcataacttgattgctacttatttacaatctttcctgcttcaacctcatttctagtccacaggcgttaattccgatcactgaccgtacatgcgattgctactaaaaagtagactccccctttttctaaattatatacaagattgtatacaatggaaataatactacaaattagcagacacttcaacatatttaattattcatcaacaaagcctaagtactcctttttacaaattacaagcatatcatcacgttttatccgtgttttaccatcagggataatcattttattatcacgtttaattaagactactaaaaacttattacgaggattgatcatcgctagagtacaatcgatccaatgatgatgctcttcaatgtattcctcatctaaataaatatcatttccttcgtaacctggtgcacacataatcaatagatcaccttttaaaacccttgttgtccctttaggtaagatcatctgattatcgcgaataattgtagcaactaacatattagtcggcattacaatatcaattaatgtttgatttatccatggatgatcatcactcaaataaactcgaattaattcaaatgagctatcatcactataatcattaaatgttttcattgtatcattttgatcatcttccactttgagccattttgctactaaaggcaatagactcccttgaaatgttattgaaagtaaagcaacgaaaaagacaatatgaaaaatgtcattattcgtatatgcaggtgataccactgtcatgattgcaaaaacaatcgaagccgcacctcttaaaccacaccaggaaataaacaattgttgtttaaacggtactctaaacggcgttaaacagataaataccgttaacggacgcgcaacaaaagttaaaaatagtgtaattaggatagcagagcctattatatcgggaatttgtgacgggaaagacaataaacctagtaagaaaaacaacaagatctgcatcatatgagaaatactgtcaaaaaaatgaactagtgaaactttcttttttaaacgactatttcctaatattattccaaatagataaacacttaaaaaaccatttccattcagtgctactggtaatgcatatgctaacaatgctagagcagctacaaaaatcgattttaagccaacttcatttaattgaatcttatctaaataattttttgctaaaagaccaattactacaccactaataatcccgaatattatctgactaaaaataagcatataaatattagttttcccgcttgataaaagggtcaaaataataattgtcagcatatatgctgtaggatcattacttccactttccatttcaagcaatggagcaatacctgcttttagatttaaacgcttcattcttaaaatactaaatactgaagccgcatcagttgaagccattactgctccaatcagcatcccttcaattaaactagtgtgcaatacccaataacaaaataaaccaacaaagccacaagttaaaataacgccaagtgtcgacattatcgttgctctaataagtaccggtttagcactattaaaattcaaacaaaaaccaccataaaacataatataaattaatgcaaatgtacaaacttgctcacttataataaaatcatcaaagctgattttaaacaagccatcacttccaaataccattcccaacaaaataaaaatcaataaagttggtactccaaatttagatgaaagccttgttgcaagaatacacacaattactactactgcaatcaataataaaaataacgtcatgtcattcctcctatctttgtattattatatcatatctaattaaaaataataaataaaactcattatgaaatttttttagcaaaaaaagaatcagtattacctgattctaacttctatcaattatatattcccttaccttagagatgaaatataacgatcccgttacaaatactgtcccctcatgagtaaaagccttatcaatcgctgttttaaaatttggctcaattttaacatcaaagccatttgctaatgtcttagcatcactagctcgaacatgttcaaattcacaaatagttatatctttagttaattgtaacaatttttcaatcatatgtttataatctttatcccgtaaagcactaaagattatttttatattgtcatattttttagcacattcatagaaagcatcaattccttctttattatgagcaccatctataataatcaaaggttcaatattaattatttcaaatctaccagcccagcgagcattatacattccctgaagtaaatcatcatcactaaaatcaacaaattgatgttcttttaaatatatcagtgcttctagtgctaaagcactattattaatctgatataaagccggtgtatcaagaataatatcataatcacgataatgataactaacattattcccatcaataattttagttattggttttaaagttataagctcactatgatgttttaaacaaacatctctaaatacagccaaacattcttcctttgtttccccggttaagtaatcaattccttctttaacaattccagctttatttaaagcaatactttgataatcatgacctaaataatcaacgtgatctaaaccaatattagtattgattgctaatttaggcataatgatattcgttgcatccaataaaccgcctaatcctacttcaaataacgcaaaatcgacattctgctcaataaaatacataattgcaataaatacttcaatttcaaacattgagatttcatattttaaccatagttccacatatcgatttgcatatctaaccattgtttcttcatcaatgaactggtcattgatacgaataatatctaatcttgagtatagtgctggtgaggtaaatgttgcaatcctatatcccgcctgttttaaaacttctttaatataattagtagttgaaccctttccatttgtcccaccaatatgaacacagtcaagaaataactgaggatttcctatatcttccatataatgtttaaaattattaaggctgtatacccgatctttttgactatttataaaattaactacctcatcataagtattaaaacgtttattgactaccctttgtttaagcattggataatataatataccatttttcttagttagatcaccgaccattttaaaacctaagtttaaataaaatcctttagccccaattccagaattaacttcaagatcagctaaagccaaattatcaatcaactcaaataattttgttccaatcccatttccctgataatcattatcaacaaataataaacttagatgttttccctgagtaagtgtaataatcccaattatttttttattctctaaacatatataagtcaaattttgtttattacgataaaatgtatcacaatttacttgattaaaactattaattccctcttgatcaaagtctttataaatatcttttttagctactcgtgcaactaattcaattgcttcttttatttcattttcttttaatattctatattccatattctccaccttagaacattatagaataaaagaagtggctaagccacttctttttttagaatttttcaaattgatcaatatttaaaacaaatacggttgccccaccaactaaaacatcaaccataattggtgtaaagaattctcccatctctgttggaggaacagtaggttctttttctacccgtttctttgaatgtgctttgataatagaaatacagtcttctactttatcatcattagttccaacaaaaaatgttgtatttccttttttcaaaaatcccccagtagtagataatttagttacgaagtatccgccttcagtaagagctccttgaaccgatgagctgtcatctgaattaacaattgcgattataagtttcatattaactcctccttatacttcttatacatatattatactacgatttttcaaaagatagtacaaatataataattaaagtatttcattatgttgaataggtaagaagatagattcatattcatttaaaacataagaatctgtcatcattgataaatagtcagcaactattaatgctggatcatttttactatatgccggagccatcttattaacaaatgcttttattttacaatcatgattattaggatcagttaattcatcataataaacatgatataactgattaatcattcggactaattttgtattttcttttactagcaccggatgttgatgaacccgattggataaaaaattcaataaagttttcaaagcactaaacacttcattagaaaagcgaagatatggctttccataactatgaataacaatatctccaatcaatcgatttatcattgatttattatcaaaacctaaaatatcagttacctctttaggaagatcagactgtttaatgattcctactttaattgcgtcttcaatatctttaccaatatatgagataacatctgacacccgaacaacacagccttctaatgtcattggacgaataattaagctagtattcttttggtgccaacaatcttcatattcctgccaaaattgcgcaatagttttatcataatccggcatatattttttcgataacatttcaccgttatgacacagaatcgcatctaacacttgtaaagagacattataaccgattccatcgcgttcaataaaaagaatattccgtacactattagcattatgggcaaaatatccaaatccctttgtctgcagaattttatcaagagccttttctccaacatgtccatatggtgcatggcctagatcatgtcctaaagccgccgcttcaatcaaatcttgatttaaagcaagaccacgaccaatctgacgagcaatccgactcacccattggacatgaatagaacgctttgaaatatgagcattattaaaaaaagataatgcttgagttttatcaacatatcgctgatatgatttacaatataaaattcgatcaatgtcttcttcaaacggccatcggatatcaaattcttcacgatttctaatcgtctgttttacttttatacaatcacgatttttagtggcatagatagaaagctgatcatcggcctctttagtcattcgtaatgcattttttatgactatttcttcttttttcattggaacacctctctatattctacacgattttttcttatttatgctactttcgccaaagtgatggtgaaaacaaaagcagcattgggaaaagttctaaacgtcctgccagcatgtcgaaagttaaaactattttagaaacatctggcaacgaaccaaaattacttactggtccaacaacatctaaaccaggaccgatattatttaaacaagaagcaatagctgaaaaagcacttttaaaatcaagattaagaaatgttaaaatcaataacgatagagcaaatatcgtaatatatacgactaaatatgcatgaatcgttctgattacattatcttcaaccggctgattttcaaattcaactgcacgaacgctatggggatgtaataatttatgcagttcatttcttgcatttttaaaataaattacaattcttgataccttgattccaccaccagttgagcctgaacaagcaccaacaaacatcaatgataataatattacttgtgaaaatactggccattgcccatagtcagcagttacaaatcctgtcgtcgttatgattgacccaacctggaaacttgaataacggaatgcagataagattgaatcatataatggtaaaatattaatcgtaattaaagctattgcagcgacaattataatcaaataccagcgcaattcttcgctttttaatacttccttgattcgccctaaaatgaagaaataaatcaagttaaaattaattccaaataagatcataaaaacagttatcacaccatcaatataagcactatcataagcagcgatacttgcgtttttaattccaaaccctcctgtaccagcggttccaaaagcattcaaaatgcaatcaaataacggcattccgccaaatagtaaaagaattatttcaataaccgtcataattgcataaatcacatataagattcgtgcagttaatcgtactttagaaaccaattttccaaccaccggtccaggaacctcagctcgtaaaatatgtaatgaacgtcctgaagcaatcgggataaatgcgattacaaacacaagaatccccattcctccaacccaatgtgtaaagcttcgccaaaataaacttgtatggcttaatgcctccacattggataaaatcgaagatccggttgttgtaaaacccgatacagtttcaaacaccgcatctacatatgaaggtatctcaccagttaaacaaaacggaatggcccctaataatgatatcaataaccagctcaatgctacgatagcaaaaccctcacgagcataaatattctttttacgaggagcttttcttgaaattagaattcctaaagccagcattattatgccaagtatcgcataataaaccccctctgtttcttgataaatcaacgagacaattactggcatgaacattaataaaccggtaattgttaataacttaccgatcgtaaaaacaatcatttttttattcatcctgcttatctccttataatatcatttagacttttcattgtctcaccacgagaaataatgactaaatgatcccctaattcaatcgtcgtatcccccttaggtacaattgtttcattttctcgggaaatagcagcaactaacacatgattctttaaattcaaatcatttaacgtcattcctaaaaaagttattttaggtgtagcgataaattcactagcttccacttcaccatctacaatcttatataaagttttaacacttgaatcatcatctttattcatttttgctcgaacataacgaattatttgaccagcaataattttctttggagctacgatactatcaacctttagactatccgcaagacctgtaaaactcatccgagtaactttagcaatagtctttttatgataaatatttttagcatacaaagataaaattaaattttcttcatctaaccctgtcaatgctaaaaaagcatctgttgtctctaaaccttcttctaataatacctcttcatcacttccatctgcattaataacagtaacaaacggtaattttttagcaagcacacgacagtgttcaatatccttttcaatgatttttacttttattccttgaacccctaactgtttagctaaataataagcaatctttcctccaccaacaattaaaacattttttatcctatttgtaacaatgccaatatctaaacaaaatcttgataagtctcgatgtgatcctgtaataaataaatgatcacctggtttaataatataattaccatctggtataattacttcttcattgtgacttacagcacatactaaaatattagtcttagtaatactatgtaattgacttagcggaatatcacgtaaataactatcttcttctacataaaattctgccaattcaacttttccacgagcaaaggtatcaacctttacagccgaaggaaatgataatgatcttctaatctcatttgctgcttctaattcaggattaataatcattgaaaaacctaactgattacgcataaaatcacgttgtttagaataatcgggatttcttactcgagcaattgtatggcgagtccccatttgttttgccattaatccagctaagatatttaattcatccgatgcagtaacacaaataatcaaatttgctgtagttgcccctgcctccatcaagatatcataagaaccaccattacctacaactccaatgacatcatataagtttactacatcttctattttttgtgcatcctggtcaatcacaataatatcatgatcctcgttggacatatgcttaattaaagtttttccaaccttaccagcacccaaaattataacattcataaagaatagcctcccttgataataaccaaattgtagtccattttcctatatttctcaataggaattcggcaaatacataagaagtttaccaaattgaaacatttttacaaggacttaataagttcttataagattaacaatttttatatcatttaattttaaaatagatttctcattttcattaactatgattcattagtataaatttaaataacttagcctatattagccttcgtaaaccatttataacaaaataaaaaaggactaaataaactaaatcctatagatgacactcctctttattttgtgtcttttctataggatttagtttaaaaagtgtccttatttagtcatataatcgaatctttccagttctttagtcttaccaattaccaagaaatgatccccattttggatcacatattctggagcaacatctagagaaagatgatcttcatcaccatgtttgattccaataatattcatattataaacacgacgaatatttaaatcaataaaattctttcctacccaatcaagtggtgctttaatttcaactactgaataatcttcatcaagttcaactaagtcaacaatactttttctcaataaactcttagctactttaagtcccatatctttttcagcacgaataactttattagcccctaccttttcaagaattttcataaattgtttatttttagccttggcaataacatatggaacacccaattcttttaaattcatagttgctaaaacagcttcttccaaatgtgttccgattgcaacaatagcaacatcaatatcctcaataccgatagctcgcagctcttcttgatcagtaacattcgctacaactgctttcgttacttcatcagctacccgctcaacacatgattcatcttgatcaacagcaataacctcacagccatattctgccaatgttgttgcgactgttgaaccgaaaattcctaatcctaatactgcatattgtttactattcatctttataccctctttttatcctaataagatattcccatcaggataccttacctcttttttacttgcttgcatatatgattttcttgcaaaagaaatcatcattgtaattggtccgattcgaccaatatacatcaacataattattacaattttaccgaaaacacttaaatacggtgttagtgaagcacttaatcctaccgttgctcctgcagaaacaacctcaaaacaaatatcaataaatggtgcctgttcggtaatactcaaagcaaatatacttaaaaatacaattgctaatgccatagaaataatcgcaaatgaacgcacaattaaacgtttaggaattcttcttgaaaaagctgttacttctttgcgtccatgataaatattgtatacttctaatacacctattgcaaacgttactgttttgattcctccagcagtacctgcaggtgaaccaccaataaacatcaatacacacatcatcaacttcgttgaaggatgtaaacttgccatgtcaactgaagcaaacccagccgttctaagagttgctgattgaaaaaaagaaatctgtatttgatcaaacagaggtagtcctccaattgttttaatattattaaattcacacaaataaaataaaacagctcctgctaataacaatactactgttgcaataataaccagttttgtatgtaatgaaaaacttttaaataaatgttttttactaaatttcgaccgttttccatactctttttttatacaatgagcaacatcaaaccaaacaacaaatccaagaccacccattataatcaaacccggaataaccaaattgataattagattattttgatatccaatcaatgagttagctcctagcacatcaaatccagcattacaaaatgctgaaatcgagtgaaagattgaataataaattcctttcacgattccaaaatcaggaataaatacaaatgctagaatgattgcacctaacccttcaacaataaatgtatatttaattacattttttacaaacttaggcagatcatttaacgatggctgatttaaagcttcttgtaaaaccaacttatttgtaagagatattttctttttgaccattattaataataaatttaaaaaagtcaaaaaacctaacccaccaatttgaattaaaataataataacgatttgtcctaatatattgaactgttcacttgttactacaggtactaatcctgttacacaagttgctgaagtagcaataaataaattatttaaatatgctgtcggtgttgtattattacaaattggcagcattaacaaaactgaaccaattaagataactgctaaaaagctaatggcaatctgtcttgttggtcgcataggatggtgctcatgatgcatctttaaagtcgagaccttcattttttatcctcctaaaagaacaagtggtcaattaatatttttgcgcccatcacaattaatattaatccaccggctaattctgctttactcttatatttttcaccaaatacattaccaactttgaccccaattatacaaataataaaggtaataattccaatcatgcttactgaaagcaataatgacacattaaagaacgcaaaagtaatgccaacagctagggcatctatgctggtagcaattgacaacatgatcaaatcccctaatctcaaactatcatcttgacattcatcatcatcacttgataatgcttctttaatcatattcgccccgattaaagctaataagataaaagcaatccagtgatcaatagctgcaatcttattggcaaatgttgttcctaaaacataacctaatgccggcattaaagcttgaaacaccccgaaaaaagcagcaatgataatagcttttttatagttcattcttcgcattgctaaacctttacagattgaaactgcaaaagcatccattgctaagcccactccaatgagggctatttctattattgacattccttatctattccccttttaaaataaattcactacattttaaaccatctattgcactagacataattccaccagcatacccagcgccttcaccaatcggcatgattcccttaatattactttgaaaattttcatcacgatataagcgtactggtgctgaacttctagattcaactcctgaaagcattgctttttctgtaaaccctgtaaatttatgattcattaattgtaatccttcttttaaagcaagattgacctcattactaaatatttgacttaatttagcatatctcacatttggttgaacactgcagcttacttcttccatttttaaatccagagtatcatttaaataatcttcaaccctcatgactggcacactataatctttaccacctaattcaaaagctttttgttctaattctcgttgataggtaataccagctaatggatgcgaactagcaaaatcttcaggtcccacagtaaccagaactgcactattagcatttgcttcatcacgagcttgattactcattccattaacaacgattccaccagcctcactacttgagtttataactttacctcccggacacatacaaaaagtatatactccacgaccattactagttttgaccgctaatttataatcagcagcttttaaacttggatgattcgcatatttaccatattgatgctcatttatgaatgactgcaagtgttcaattcgaagtcctaccgcaaatgatttttgctccatttttattcctttttgatatagcatttcataagtgtctcgagcactatgaccaattgctagaactaatttatctaattccatcgtagttttaatattatttttttcaacaacaatgtttactagctgatcatctgctaaattaacatcaactaattttgtctcaaataacacttcaccaccattagcaataatcgtctcacgcatacttttaacaaccttaattaaataatcagtccctacatgtggcttatttacatataaaatatcactttcagcaccatgcttaacaaaggtttcaagaataaatttttttcgtttatccttaaccccagttgttaatttgccatcactaaaagttcctgctcccccttccccaaattgaacattactatcaggacttaatttccctgttttaaaaaagttatcgatatcttctttcctctgttcaaccgcattgccacgttcaatcaatgttaccttttgatgagcccgcgccaaattataagcgcaaaaaagtccagcgggaccactgcctactactacaatatgcttgtcagttgattttaaaaccggatagtcataagcaactacttttgataagtttaatttaggatatttttttatcattaaatcttcattctcgacagtaaaattaaaactacaaacaaagtgaactttgttttttcttcttgcatcaacagcctgtttaactagtttaacatcaaatattttatttttagaaatatttaattgttgtgagattatttttcgataatctgccagttccaaaggaacttttacattatttattaataacatttttttacctgcttattcattattgttttagcgatatgatggcctgaagcaaaagcaaaatgtaaattatatccgccacaatcaccatcaacatctaaaagctccccagccaaatatattccagggtatttaatcacttccaaattttcatctatttcatccaaactaaccccaccactcataacttgagctttactgtaatcatatgtatcgataattttaaagcggatatcttttaaattatcaatatcttttaatattttagctaatttatcattgaagattccttctaaataataatgaccaaatctatcatgccgctcttttaaaaatcgttctaattcttggctagtatattcctccattagatctaaactaatctctttatttccgcaataacgtgataataatcgtgataactgcataatacatattcctgataacccattatcactaaataacacttcaccattttgactttcaattaattttccatctactaataaactcgctttacatttagttcgaacgccttttaagcttcggtaggctggtttggtttttatttgaactagactaggatacaactttgtcacctttaaatcaagcaatttaaccaaatcataactatttttgcctgataataaagaagcaggtgagcctgttgcaataacaatattattacaaaagtattcacctttattagttttaactatatacccatcctttttaacgataatatttttagcctgacactcttcaattaaagcaacttgatcaaaattattcattaaagcattttttacggttaaactttgattagaacgcggataaagaagtgttcccacctgtcgagtcattactccaatttggttaaaatattttcttgcatcaaaggcatgaataatcctcttaatcttggattcatcagtattgtaaaaatacatatctaaattagtattagataaattacagcgaccattaccactagctaaaatttttcgtcctgccttatttgattgttcaagaataattacattatgattacttttagctagttcatgaccacaaatcagtccactagctccagctccaataattactgttgtttccatacattgctccttttaatgcctagattatagcatactcgctatttatttaaaactaatcttaatgtttttagcagagttcttttgaattagaaaaggatgaactactattttattccatgaaacctttttgattattttaaaacaactgctttttatctattaaactctgctttttcctcataaaatcagaatatttatctcatttaaaacgccccttgataatattaatcgataagtgtataatttaaaagaatttatcactttaaggaggagttatttatgggtagagcacatgaggtgcgcaaagttgcaatggcaaaaacagcagcaaaaaaagctaaattgtactcacgttatggtaaagagatttacttagctgcaaaagcaggtggacctgaaccagatggtaacttagcattacgtcgtttaattgaaaaagctaaaaaagaacaagtacccgctgatgttattaaaagagcaattgataaagtaaaaagtggtgttactgaaaattatgaagaaaaagtatttgaagggtatgctaatggtggagctactttaatcgttaaatgtctaactgataatattaatcgtactatttcatcagtacgtcctgcttttacaaagtcaaaagcaaaattaggaaatgaaggatctgtttcatatttatatgacgttatcagcgtcgttgcttttaaaggactagatgaagaaactgttttagatgctttagtcatggctgaagttgatgctcaagatattgttagtgaagaagatggaactatcaaaattattggtgaaccaactgatttatataaaatcaaagaggcaattgaaggtattaaatctgatattgaatttgaaatagatgaaattcagactttaccacaagacactgttgaacttgaaggtgaagatatggaattatttgaacgtttaatgaataatcttaatgattgtgatgatgttgatcaaatttatcataatgttgcaaattacgacgagggagaataattctccctttttttacaaggaggtattttatgcaagtaacttatatttataacagtgggtttttagttgaattggataagcatattttactattcgattattatcaaggaacaattcccccgcttaatcaaaataaaccattatatgtctttgtctctcattttcatcatgaccactacaatcctgcaatttatcaaatcaaccatcctaaaatcacttatattatcgaccgaaaaatcaataatactggaattaaagttcgccctagcgaaatatatgaaattgatgatttgtatattcaaaccctattatcaacagatgcaggtgtagcttttgttgtaaaggttgaaaataaacaaatttatcatgctggtgatttacactggtggcactggattggtgaacctgaggctgacaacaaatatcaagctggaacttttaaaaaagaaattagtaaaattaaagatattcattttgatttaatgatgattcctctagaccctcgtcttgaagaaagtagctggtggggtatggagcatattttaaaaaatattaaaacaaaatatgttttgccaatgcattttactgataatcctaaaatgatgcttaaatatctcaatcacgaacctttgaaacagtataataatattttaaagataaataatgaaggggaaatatttattattggtgataacaatgatgattagaccttatttacataatgctaaatactatgaaaccgatcaaatgggaattattcatcactctaactatattcgctggtttgaagaagcaagaatcgattatatgaaccaaattggtttaacatataaaaaaatggaagaagaaggtatcatttctcctgttttatcaattaattgtaattatcaaaaaatgatgtattttgatgaccttgctataattgaagttaaaataactaaatatactggtgtccgcttcgcctgtgaatataagatatataatcaaaaacatacactttgtactactggcaactctaatcattgttttactgatcggagtggacgaccaattaatttaaaaaaaatcaaaccagattttgatcgactttttaaaaaaattattgaataacaaaaaatatatccttaatggatatattttttattagctcgctaatactagtatatattgatttatgacatagggataattatagaacaaatcatttcagtattaacacccaaattgctaattcccagaaacatctcaatatttcatttcccataatatcttctatattacctatctataataactctttaaacaagattaagcaaataaatatataaaaaaatacagtctattttttaggaataatttcaatccaataatcatcaggatcattaataaaatataatcccattgccttattttcaaaacatatacatcccatttccttatgtaactgataagcttgatcaaaatcatctacttcaaaacaaatatggctttcattttcacctaattcataagcttgcggatgatcccttaaccaagttaactcaatttgaaaattacttaaaccatcaccaagataagttaaaataaaactaccatcattagcttctttagttctttcgacttttaaacctaaagccttttggtaaaaagcaacacttttattgatatctgtaatattaatattacaatgtatacacttaaatttcatctttctctcctaataattaataaaccgttttataatcattatcttcaatatctaatttaccaaagtatttttcaaaatcaacaccaacaaagttagatagatccttcatctctaatactgtcttgacatcaacgtcaattccattttccatgcgatcttttgtagcctcaacttctttttcaccatgagtatatatacgcggttgtccttcagcttttggagcatcccttaattcttgcaggaacgttgaaaaatgtgtctcaatatcttctgggtttccaaatattttaggatcaatagcaataaacccatgacatgttcccccaatgccatttgtatgtgtatgattcgaagtcagtccttgtgataaaatagaacagaaaatctcacagaacattccataaccatatcctttatggcttcctaattgttccgttgaaccacctaaaggcataatcccaccaccgattttattagcaatgttgtctaaaacatctggtgcatctatagaaggattaccatctttatctagtgcccatccatttggtaattctttttcagcttttcgatacatttctaacttaccacgagtaactactgtagtagaagcatcaaaaaagaatggatatggcttagctggcattgctaaagcaataggattagatcctagcattgctttacgggcaaaagtaggaaccataatagcttctgagttagtaaatgacatccccattaatccctcgtcacaagccatttttgcataataaccagcaattccataatgattagaatttcttaccgttacaattgccatccctactgttttagctttttcaatacatttttccattgcaaatttactaatcaattggcccattccagcatgaccatcaatcactgccgaaacaggggtttcaaaaacaatctcaggttttgcatcaaccttaatcatgcctttttcaatccctttgtgataccgtgaaagccgctgcataccatgtgactcaattccatatacgtctgacaataataatacatctgtgattgttttgctttcatcacttgtaaaaccgaatttttcaaatgcttcattacaaaaagcatttaatgtttcaaatttaaatttcaaatgtgccataatttacctcacttaatcgttatcgtcaacattctatcacaaagttcccatttagtcattatttccgccaatgatttattacattattgttcaaaaaaagtagatcactgatctacttcatataggcggtatttatcaaaatatattaataagatattcataataacttcaattggccaataaacaagaataaagacacttaatccaaccaataaatcaaattgcagtactgaaaccatatatactgctggaagtattgcaacaatgataggaatgaaccccattcccgaaggaaactggatttgcatcaacgttccacactcaggacatctttgtcttgctttataggcaaaagaagctgctttaaattcatgattacagttcgaacaatacattataatgtacagatcataactgtcattgtaccatcatattctacggcatcttgatcagcacaaactacaaagttatcgcccatttttacactattcccattaataacaccattacctttaataacagtgactaattggaatggtttatcattaacaatcgtatttttaccagtcatttcgtatttattaactgtaaaaaattcacttgataccaacttcgtcctcgttccattttcaattgctgtttcaaccatactatccgccgcaagtggaacatatggaactgttgcaacatcaatcgattgttgtacatgcaattgacgttcatttccttgagcatctttacgatgataatcataaacacgatatgtaatatctgaagattgttgtgcttcataaattaatgaaccactgcaaatagcatgaatcgtacctgaaggaatatagaagaagtctccttctttgatatcaaatttatttaacagattgtcgtagtcatcattttcaatcgcttttactaactcttctttagtcttagcatggtgtcccattaccatttttgttccttcatcggtatttagaacataccagcattctgttttacctaaagaattttcatgagctttagcgtattcatcatttggatgaacttgaacagataaatcgttacaagcatcaataatttttaccaataatggaaattggtcaccttcaatattagcaaataactctcgatgttcatcccataaactagataatgtctttccagcaaattctccatcactaatagtacaatctccatttttgtgagctgagattgcccaacactcaccagtattgtcactaggaatatcatagccataaacatctcttaatttatgacctccccaaatcatttctttaaaaactggattaatttttaatacgtgtcccatttttttaccttctttctatgtattttaaaaattcatcaatattatcatcattgaatactattatgccatgtttttctagtagttggcaagtaataccatcaccatttataacggtatgactaaacgtcccatcatatatatagttttttccacaactaggactttttgcctttaacaaaactacatcaacatcatgttcttgtaatatttctaaactcttttgtgctcctaatcgatattccttagtccaatcaacaccattaatatcaactacttttccatctcttatctcacaaggagaacgaggaatactcaatccccctaacacttcaggacaaatcattattgcttcatttcgcataaccatctctttgactaatttaattaatttatcatcaccactataagtgcatttgcatcccgccagacaactacttacaccaatcatttatagcctctttaatttcattggcatgatcaacaacaagatctgcaccattttcaagcagctcctgacgtcctctaaatccccatgatacgcctattgatctaaccttcgtattttttgcagttaaaatatcaacgtcactatcgcctatatagacgacttcgtttttacgcacatcaaaaagattaataactagatttgttaaacagggatccggctttttaggatgtctaatactactaccgaaaatatatttaaaacatcctggaaataaagtcttaacaattttaactgcatggtcttgcggtttattagtcacaacagccaaattatatccttgatcagccaaagtattaattaattttgtgattccaggatatggtttggtattttctaaacaaatttcaccataaatttcatcaaaacgtttctttacagctgtaatatccccctgatgatcagcaggtaaagcccgctcaagcaattttaatacaccatttccaacaaaataacgatattcatcaagggtatgcgtaggatatcctttttctgttaaaataacattaacagtatttgcaagatcaactaaagaatctatcaatgtaccatctaagtcaaatataattgtatttatcatcttatcactccattatttacgacagtattataacacatattttacttgtatgcgcactttgttgtggtataatttagaattgaggagtgaaaggatgaaagaaaaaagtagtgtatttatgacattaggtacagctgttggattaacgattgcagttattatttttgttattggctttgttaataaagaaacaagttcatggagcgcactctggtttatcgtatttgcatttattggacgtgtaattggatatggcttagatcgaattgtcgataaaaacaatcaaaaaaagcatggttaatatttaaggattcgcttaagaatccttttttcgttctaccatagccatttttaatgtgatcgtttttaatttttctttataacttgcttctgcagcattaaatgcatctaaaatcatcgcctgcttttgatccatgatttcttttaattcattaacaaaaacacgttctactagtcccgttgcttttgcaaacggctctttaccctcgatagcctcaaaaatatccagcaaagtaatcttatcaggtttccggcttaagcatacaccaccttttttccctgcttcagatgtaatcagcccagctacaactaattgcctaataattttttttaaataagaatcagaaacacctaaactatcagagatattataactttttaaaggtttttcatcattgctatgggcgataattattaataaacaaattgcttgttcgacactattttttactttcattacttcatttcccctttgctatatattgtaacattattcgagattaataatctagaaaatattttttataaattgattgacaaacttatagtagatgattaaaatatgctttattaatagataaactttatccatggatagattatatctattaatatattagatttcaagataaaactataatttaatggaaaggagaaaaaatgataaaaaaagagtggtcagcatttcgtaaaaattggtggctgaaaatagtggccgtagccatcattgcaattccaagtatttatgcgggggtattcttaggctcaatatgggatccgtatggaaatactaaagaaattcccgtagcggtagttaatgaggataaaaaggttgaatataatgattccactttaaatgtcggtaaagagttagcaaaaagtcttcaaaacaatgattcaatggattttaaactggttgacagtaaaactgctgatcaaggattaaaagacggtgattattatatggtaattactattcctagtaatttttctaaaaatgcaacaacattattagatgcccaaccacaaaaaatgattttaaactatactactaatcctggcagcagttacattgcttctaaaatggatgattcagcaattgctaaaatcaaagctgaagtttcttcaaccgtaactaagacttatgctgaaactattttcaatcaattgggaacagttggaagcggcatgagtgaggcagctgatggttctaatcaaattaatgatggggctaatcagttaattagtggtaataaaactatttcggataatcttcaagtattagcaactagttcaatcacttttaaagatggggcttctacccttacaaacgggttacaagattataccgatggtgtagtaactgtaaataatggtgtatattcattaaaggatggtatcaattctctaaacaacgctactcctgcattatcaagtggaataaatcaacttgataatggagccacagaacttcaaattggaataagtcaatatactggcggtgttactagcgcttatcaaggttctcaagctttagttagcaataattctaccttaagtaatggtgtagatactctcgcagccggggcaagtcaattaaaagctggtaaccagcaaatcagtgatggtttaacacaaatggcttcacaagtaaaaacatctagtatttctttatcaaattatactaccttaatcaatacacttcaaaatagtggtaatgcagactataaaaagctagcacaaacaattttggatacaggtctaagtaaagaagaagttgaacaatacggattaacaaagtttggtgtaactgatgctttgccttcttcatatcaattggttcagcagatgagttctagtcttagtacgatgaatacagccttaaatggtgatacaactaccccaggtctagcaactgctagtagaactatacaagctggtttaaataatcttgatgcttcaattagtggtggtgaatatactaacactgatggtagtaaaactactattcccacagagaaaagtttaaaaactggaattaaaagctatcttgctggaacaagtcaaatcaatagtggcttagctcaattaaatgacaattcaagttctttagtagatggtgccaataaattaaaaactggtacttctcaattagctagccaaacaccaactctaactaacggtatcggtgcccttgatcaaggagcaaaacaattagctgatggtactagtactttagtaagcaataatccaactttgctcagcggtgctgatcagttagccgatggagctaatcaaatcagtgacggcgctggacaattagcagctggatcaactactcttggaactgggttaaccaccttacaagacggcgcaaatactttagctacctcacttcatgatggtgcagagcaggtaaatagtattaacagtaacgacagcacatttgatatgcttgctagtcctgtagatacttctcataaggaaatttcaacagttgaaaacaatggtcatggaatggctccatatatgatgagtgtaggtttatatgtagcttgtatggcatttacgttgatgtatccattattcaatgatgttgaaaaagcagaaagcggctttaaatattggttatctaaagcttcagtctggtttacagtatctacaattgcttcaattgtaatgattgcatcattgatgttcttctgtgattttgctccgcaacagttactaatgacttttatctttgctgtaattgtaggagcggcttcaatggcattagtgaccttgttaagtattgtgtgtggtaaaattggtgaatttgtactcttagtcttcatggttattaatttgggtggttcggccggtacttatccactagaaacatcaagtgcaatttttaaagcaattcatccttttatgccattcacatatagcgttgatggcttcagaaaagttattagtatgtcaaatgtttcattgaatacagaaataattgtatttgtaggaattattattatttgcagtttattaaccattctggtttataatcatcgaattaaaaaaccaactccattaattcctcaagcatttgaaaatgttaatgaataaataaaagcaaaagacagtgtaggattctatactgtcttttgcttttaaaatacactttttatcccattaaaatgacttttaatacctttgattttataaacacatattggaacataaaaacagtacaatttcttgtactgtttttatgttccactcaagtaaatgcataaaaatttaatttctcatctttttttcattcttaaaatcagtatataaataattactaaaataatcgcaagaccatatggaaacataaaatctttaactactccaaggatgtaactaaaagtatctttttcaatttctttagtagtagcatactcttcttgatataataatttgtcttgataatatacttttaaatcaccaactttttctccctttttaacaggtgcttctaattttttaaatgagtatttatattctaaatcatctttattaaaatcatttggtaaaaaggcactaacgtcatttaaatttgtaatagctattttttgttcgtcctttgctaaagttacatctaacgttcttactttagcacccttagttaaaatactttgtaatgaataatgttgccccacataattcattatatctaaagtatcacttactgcagcatgagttttaacatcattattaacactatgacctacaatggtaataatttcattatcattaacccgatttaaacttgatagacaactcttagcctcgtttgtatacccacttttacaaccaagaatatcatcaacatttatttttgctcgtttagcattatacatcgatttattaacccattgatgtaatccatttgaagacgttttataacgttgagcatatatatttttaaaatcttcattttgaattgcatattgaacaattaatgccatatcatgaactgtagtataatgattttcatcatgaatcccggtcgtatttacaaaatgagtatcttttaaatttaatttttgtgctaattcattcattttatcaacaaatgcctcttgacttccacataaattatttgctagagctctagttgcatccgccccacttggtaaaatagcgccatataataaatcttcatatgtaactgtctctccaacttcaaaattagctgaggaagctccagtttcccatacagtatcaatatcactttgtgtaattactgttgttttcttcatatcatccattaattctaaagcaagaataacggtcattaccttggtcatactcgcaggatacatccgttcatccatgttcttattatataaaaccaaaccactttttgcatcaattgcaactgcataatcacaagtaagcccaatatcttcactattttctaaagctcttatcggtgttagtgttgctattaagcatattccaactaataaaaacgataatatttttttacacattcaattcttcctccctgacattacttcgttttaaaaatgatagtttcgtttcagaaacaataattgcaacaaaaatgataacaaatcctgcaataacttttaacgtaagtacttctccatataatagaactgaaaatattacaccaaatacagactcaagacttaataaaatcgctgcattacactcactcacaagattttgaccaatattttgacatagtaatgttagcgcagtagcaaaaaaaactagatagccaatctgcaagatcacactactgtcaatttgttttatcactgtaatatcttcaaataataatgaaccaaacaaagctaagatcgcagtcattccaaattgtagtgtggttaatttaataggatgcatctcttgtgaatacttttttatcgccaagatatgtaaggcataaaaaaatcctccacaaatagttaaaagatcaccagtattcattgtcaaatcaccatctaaagaaactaaagcaactcctgatacacagagtaaagctgcaacaaagttataattatcaggtcgtttatgatagaataaccaaactaaaaaaggtacaattgcacaataaatagcagttaaaaatgcatttttccctggggttgtcattgtcagacctaatgtctgtatcaaataagccaaaaataaacaggttcctgtaatcgcacccccttttaaatcacgaatacaagtatctttaatatatttataaaacattatgatcattactaatgttgccaatgtaaaccgaacaaataacaggacattaggagttaagaaatccactgcacttttcataacaataaatgaactcccccaaatcaaggctgctaataacaacaaaaatgaccctttaaatttatcacttttcatttgaaccctccatacatacttgtttattttaacactttcgacctatttcaacaatatttatttaataaaaccccattaaacagctactttttctattttagtaataactattgcaataaaaaaagtaatctaaatcgaacagtcatccttggctatccaagatcagagatgcagtccaatttatatgattacttttagctatacttatttaaacttagagattttatctatccattgattacagcatgacaacgagggcacaattcgccttccatttcatcttcatcaaaatagttccaacatcgtggacattgatgaccttcgaacttttcaactttgatataagcgctatcaaattcttctaatgaagaatctttcactaactcaactttagcaacaataaataattgttttaagtcagcaagcattgaagccatttccttaaattcatcttttaatgaaatcgtcacttttgcttccatatttgattttataattttttcatttctcaatccttctaaagctttcatgacatctttacgaagctctaggaaacgatcaaaatgagcttttaattgatcactgttaggcatattgatcatttcaacattaggttctaagaaaattgaatcagccttattatcatcacaatggaaatgatcatgtaattcttcagcagtaaatactagaactggtgaaatcaatttcatcattgctttagcatgataatataaaactgtttggacttgtcttctacgaagactatcggctttttcaatataaagaatatctttagtaaagtccatatagaatgagcttaataaattagtaaaataatttaaaattaattgatttgcttcagcaaaatcataattatcataagctttatgatatcctttaatcaagtcatttaattgagctagcatatatttatcaacatcagccaaagcttcaactgcaactagatcagcttgtttaaaatcatttaagtttcctaatacgaaacgcattgtatttctaattttacgataattttcagaaatttgtttcataatatcattactgattcttacatcttgctggtaagctactgaagttgcccataatcttacaatatcagctccatattggttaactaatttaattggatcaacagtattacctaatgatttagacattttattgcctttgccatctaaaacaaatccatgtgataaaactgttttgtatggtgcacaaccatgagctgctgttccaacaatcagtgaagagttaaaccagccacggtattgatcactaccttcaaaatataaatcaactggataacgatatccccgttcaatcatacatccagtatggctggaacctgagtcaaaccatacatccataatatctttttcttttttaaagataccatttggtgaatgttcatttatatatccttctggtaataaatctttttcatcacgttcaaaccaaacatttgaaccatattttctaaataaattagaaatatgtttaaaaacttcttcttccataatcggtgttccatcttcacaataaatgattggaatcggtactccccaagatctttgacgagaaatacaccagtcaccacgatctttaatcatattataaatacgaatatgtccccactcatttaaccagttaactttatcaatctcacttaataatttctctctgattttatcaactgaacagaaccattgatcagtcgctctaaaaataattggttttttagtacgccaatcatgtggataactatgtgtaataaattcaagctttaataaaactcctaattcatctagtttcattgtaactgttttatttgcatcatctacatattgaccttctagccattcaccacagtctttcatcatacatccatgttcatcaacgttacaatatgctggtaaaccatatttttgtccgacgaaaaagtcatctgctccgaatcctggtgctgtatgaacgcaaccagtccccgcctcagcagtaacatgatcacctaagatcactaatgattcacgatcatataaaggatgttgacaagtgattaattctaactcactacctttaaagtttttgattactttatactcagtaatttcaaatttttccattaatgaatcaactaattcatttagaacgattaattttcctttagttgtttcaatcagtgcataatcgtaacgctcatttaaacaaattgccaggtttgcaggaatagtccaaggtgtagttgtccaaataacaaagctagtatcagtatctaagattcctttaccgtctttaacagcaaatttaacaaaaatagtcggactcttaatatcatgatattcaatctcagcctctgctaaagctgattcacttgatggtgaccaatagacaggttttaaccctttaaaaattaatccatccattgccatttttgcaaatacatcaatttgattagcttcaaactcgggcattaaagtcaaatatggatgtttataatcagcaaatgtccccattctgattaattgttccatttgtttatttacttgctcatgagcatattcatcacatttttctctaaaagccgctgtagacatttctttacgatttacccctaatttttgaatcgcattttcaattggtaatccatgcgtatcccaaccaggaatatatggcgtatagcgtccctccatattattgtaacgacagataacatctttgattaccttatttaacatatgtcccatatgcatattaccattggcatatggtggaccatcatgaaaaacaaaatcttctttccctttgttttgctcaattactctttcgtacatgttctctttttgccagcgttcaacatacttaggttcttttttaggaagattcccacgcatttcgaactcagtttttggcattaatagtgtgtccttatagttcatttcttttcctccaaataaattaaaaaacgtcctttcaaaataaaaggacgaataattcgcggtaccaccttaattcgtattttccaatacgcactcaaacatcttaacgcgattaacggcaacccctactaatttcaaggtgctactccagagtgatccattataataatagttactgattttcaccatccatcagctctctacaaacatcttactataaactgtctctttcatcgtatttagttatcttcatcttcttcgttaataagattaaagacttccgaattatcgattgaatccaaaatatcttgggacattttttgaaccgatgaacggaatttaattgcctgatctttaaaatcattcatctcactagataaactacgaacatagtccaatgattcttttaagatcatattggcattgcgtttagccttatcaatcaattcacttgcttcttttaaggctagacgagcaatttcttcattagttttttcggtaatattgacacgatgctgcaatagcgagttttgttctttaacatgatctaattcatctgttaaactagcaacttgctgctttagtgatgctaactcagcttgataatcatctattttactatcaacttgttgaacactatagcccctaaattgctttttaaattcactcatcgtctcactcccctacttataaaaatacccttcaacgacataattatcctgtttagttcgtcgtttagtatcgacaaatttaactcttccatgacgtcttaacgatattatatcactattattacacaaataatttatttcttcaacttctttatgattaacttttacaaaacctgattgaatataactgacagccttgcttcgaggcactccatataaagttgaaacaactttatctaaacgaaatgaggagacaataaaagttttacttatatattgatgtttaattgtaataatctcttcactctctaaaattttaactttactacgtttaattttaattaagttattttttacatactcatagatttttgcatccatggcaacataaaaattatcctcatactcataaatatccccaaataattcgcgtttaacccctaaagacattaatgctcctaaaatatctcgatgattcaatgtaccaaatggttttgcataacttattttagctaaaactatttcaaaatcttctttttcaatttgataaaatgatggtgcaataatcaaacgtttcatttcactatcaaccattccaccatcttcaataacaatcaaatcattttgattccctacaatgctataaacaattgattgatgatatggatttaaaaatttagttaaaacaagtctttgtttatatagagcttgatctttaaactctaatacctttttaacaaaaacttcttcacctttaaaatgctctatcataattaaaaagtattagctaagctaatacttatctattattcttcagattcatcttcatctaaatcaattgtcccagaaacaccaatgtttttaggagtacataagaatattctaggtccaattctttggatgtctccttcaattgcaaagataactccgcttaaaaaatctacaactcgtttagattgttctttttgtaaacgatgcaagttaacaacagcagctttcttttgctttaaatgatttgcaatatcttgagtttctgcaaatgcccgtggttcaaataaaattaattggctatctttatttgcatttaaagctttgattgcatcacttgttttagaaaactttgcttgctcaaataagcttgttttaggttctgtatcaatctctacatcttcatattcttcaacttcgtcaccgtcttcgtcaaaaaaccatttttttactttttgtccgtatcccatgaagtggtcctccttaatttattactagtatattatagcacaataaatccgtccataaaaggataattactcaacaaactgctggttatttaaaagattttattaaaatagtcaaatgcttaaacatttgactattatggctcaatcgatacaagaatcacatcgccaccaatgctcactacacattcaattggaataacaatacatggtgcttctttaaaaaaacataatagtttaaaaaagctatatttctctactacaattgcctgtatacatttaccgcaccagtcaatttcaatatcgctgataaaaccaattttgcagccatcaacgacattgatcacgtctttagactgcagttttacaaatctcatcgaatcaccattaatatatatgcttattttagataattatgtaaattatctaaagcttttctttcgattcttgacacttgagcttgggaaataaataattcctttgcaatctcactttgggacaacccctcaaaatatctttgtttaatcacacgatgctctttttgatttaatgattttaaagcatcatataaatctattgtttcatttgttcttgatacaactgttttatcatctgtaatcgaatcaatcatctttaaattattaccatcatcatttttaacttcttcttgtaatgaagaaacactgtttgttgataacagcgcttcaataacagcacttggctcaacttccagttcattagctaattcatttatcgttggttcacgatttaattttgttatatagctatctttaacctttaaaaccttatacgctaaatctcgaattgagcgagaaatcttgatttgatggttatcacgaagataacgtttcatctcaccaattattagaggaactgcatatgttgaaaatttcaaaccaaaactagtgttaaaattttcaattgctttaatcagcccaatcattccaacttgaaataagtcatccatgctatcttcacgaccataaaaacgtcttgccattgataaaactaacttagtattatcgttaactaatctgtcttttatcgcctcgtttttagtagcttggtattcgtctatcaatttataagtttcatcggttgtaagtctttttttcggttcttgataaccatttataataacttgataattactcatatttgccttctttcaactctatttttagcaaatatgacaaatttatacttattttatttcattataatttaatttattacgtaattttttgattattttcttttctaatcgtgaaatatatgactgtgaaattcccatcattttagcaacatccttttgcgtcaactcatcataattcattaaaccataacgaaacatcaaaatttccttttcacgtttggataaatccttaaaagcctcataaaacattgctttttgatcactttgttccaattcatttttaacaatatcactatctgttccaataatatccgataacaacaattcatttccatcataatcaatatttaatggttcatctaaagatatctcgtgacgcaatttattattttttcttagaaacatcaaaatttcattttctatacaccgtgatgcataagtagctaacttaatatttttatcaggtttaaaagtattgattgctttaactaaaccaatcgttccgatactaatcaaatcttctattccaccattttgcgtcgtatcatagcgttttgcaacatatacaactagccttaaattatgctcaatcaacaaatctcgagcatcattatcaccagctcccaacttttctaaagcttccttttcttcaataccttttaatggtggtggtaagatatcatgccgtccaatataataaagatatttagttttatttaatatttttaaaataaattttatcattataaaattcctcccataagtgatttatttaataaacaatcatattgtatcccggcaatcaccccgacatagatatcttgtaatctctgattattaattataacctgatcaactttgattatttcaataatatcttcacgtaaatcatttaattctaaaacatcgattacttcatactcatcaataattttttgattaattatgattaaaggaaaaccctcatagtaaacttcattaccactatcaagaaatcctttaattgtataactatgttgctggtaatccaatttcattacatataaatagtcatcaattcttatttttctttttaaataaacaataaacataatctgcatcaatacaacgagcaagctaacaataaataaaccaatgctactaacatttactggtgaaattaagattccattataaataaatgcttctggaattattgaactagcgaataataataatgaaaaataaacaaaaataaaaattggataatacagaaatatttggcgttgatatagacataaaaaaacaactgcccagatcaatataattaaccaactataactatctaagtataatagtaaaattactccacttaagtaaaagctatgtttaataaccattagatacgacatttccttactaattaaaatcgccatcatttccaaagcaaccaaaataattaaatagtttgttagatacgtcagttcaatatatacctccatcttttcacccctaactatcatagcgcttatctaagcaaaaaaatgtcaagaaaagaaaaaaggatcttgcgatcctaatattttaatttgattctttaattgcttttaaaacagcatttctaaagccattttcttctaaagtttcgacccctttgatagtgatccccccaggcgaacaaacttgatcttttaaaatacctggatgtaactgtgtttctttttgcatcattccagcaccgattaaagtctgactagctagtctataagcaacatctcttggtaagcctaagcgtaccccaccatctgccattgcttcaataaacatataaacaaacgctggtccacaaccactaatacttcctccggctttcatttgataacttggtaaaattactacttctccaatgcttgaaaacatctcaacagcataatttagttcatctgcagttagcgtattttcttgttcaaataaagtcattccattcattaccaaagctggtgtattgggcatgatcgtcaaatgtcgtgttgaatccaataacaattcattatacatttcattatcgtaaccagcaacaattgaaataattgccttattatctaattcgtctgtaattttagcgactacatcttcaacaacatttggtttaactgcaattatcactatgtcagccatagcaactaattctttttcactagtacaaacatttattgaaaaatcagtatgcatctttgttagtttatcattatctatatcgaatgcataaacattttcaccttcaacaaaaccacttttaataatcccgccagcaatagcaccggccatgtttcccataccaataaatcctatttttttcatctaaattatccccctttgcaaaataagctaaccttagttagcttattaattaaactcttctattttttataaatgctggtggaaaatcaccgtcatcatcgtcttcttcatcttcaaaacgcgctgataaaggtacaacatcttcaacactgcgtgtttttaaaacgtttggacgtggttcaaaatcatcatcgttttcctcttcaaaacctgttgcaataacagtgacgataatatcatcatctaaattttcattgattgcaattcctaaatatgtattaatatcatcaccaacttcttgagaaatcgtctcaagagcaatatttgcatcaaataatgaaatatttggtccaccagttacattaataattgcatctttagcacccgctacagacacttctaataatggcgaagaaatagcacgttttgcagcctctttcgctttatcatcaccagaagacatcccaattccaattaaagcattaccgcgatttttcataaccgcagaaacatcagcaaagtcaagattaataaaagcaggaatagcaattaagtcagtaattgtttgaaccccttgacgtaaaacattatcagcttctctgaatgcttcttgcattggacgtccaccgatcaattgtaataaacgatcgttagaaacggtaataattgaatcgacgttagcacgtaattcttcaatccctgagattgcttgtttttttcttttcattccttcaaaagtaaatggttttgtaataaccccaactgttaaagcacctaattcacgagcaattttagcaaatacgggagcagccccagtacctgttccaccacccataccagcagcgataaaaaccatatctgcaccttctagcacttgacgaatttctgcttctgattcaagagctgctttttttccaatttcaggttctccaccagctcctagaccttttgttaaatctctacctaattcaattttattagtaacaggagaacgttttaatacttgcaaatcagtatttgcaacataaaattctactccagctacaccctcttctaccatgcggtttacggcattattaccaccaccaccaacaccaattactttaattcgtgctacttgttcaaatcctaattcttcactcatgacaatatatcctctctttttatattaatcttcactaaaaaatgaatctaatagttttgacattttacttccttgttttgaaggcgctgactttgtcaaccctttaaatctaattgccattgtatttgtcacatccggcaatactaatgaaggtgtataatcaccaacaacctgttttctttccattaagtaataaaccatcccaattgcagctactaatgacatatcacgagttccaatcgtatcaggacgatagattcgaacgggacattctaaaacctctgtagcaatagtatccagcatttccagctctccaccaccaccaacgattaaagtttcatatttactaatatcatcaataactgaaatcttttctttaatcttattcattacttcataagctgtttcatttaataaatcagccaagtcctgttgtgtataatcacgtttttgttcatcaacaaaggttgtatgaataatatcattctgaccttgtgttacatctaatgaaccatatttaattttataagcttctgcctgattcattgatatctgcatattttgggcaattttacgagtaaaatcataccctcctacttggcaaactgtcaagtattgtaaatatccatctttataaaatgaaactgtcgaagtcttataacccatatctatcaataaagcaccttcttgaagatatactgcatcaaaagcctcttttgcgcatgcaaacgcattgatagtaatatcaagtacttccacaccgcatttttcaactaccgaaatatatgggtaaagcaactctttactagtagtaatgactaaagaatcaacgatcaaatttcttgaaagttcccctaaaggcgcctcaacggttgctcctttatcactatgatagcgaactggaataattgatactacttcttcatccttagaacgtttaaattttgatgacaaacgcaatactctaactatatcatcagtagatactttagacccagcatctgataaactaatgctgctgtcactttgatataatttagcttttatggttggaattgttaaagcgacgctcgtaatcttagattctagaaaagcctctgcttcatcaatcagttttcgtatatctctaattaagatacgatcatcttctataattccctttttcactccgtgactaggaatcgttttgacaaacagtacattgacattaatgttatttacttcagcaacaagaaactttaaggttgcactaccgatgtctaaaacagcgtaaatatctttcatcacgtatccccttttcttagtatatatacaatattagcataaaaacagttatttttaaactcctttaagcaatcccgtagaaaaaattaattatgaacataaacatacttcccgacaaaatcataatacttataatctgggaattcttccatctttaaagcataattatcgccctttaattgtactgccatatcatcatatcgcaagtatagaattttaccatcatccatgataaattcacaacgtttatcgtcaagattttcaggcgcataattaatatctgaaatttgattaactacttgagcgggaatttttgcaaattcctttgcaaaagctgcaaagcgatcataatcaaaaccatttaattttggacaccgttgtacatatgtagttaatactccagcctcatctttagttacacggccagtttcatcaacaacatacaatatattatcaatcgtacattgaccaatcgggtcagcttcaactacttttattttaacatgaccaaataaatcttttgtaaccttggcatccttaattagcgatgtttttttaatggcattttcagctgcatccatacttttaaagaaagtataatcctgatgcagttttatttttgaagcggtaattatttcttcactactcacacgattattaccactaacagttattgtctgtaaacgactataatcactgacaaaaaaagcaataatcaatcctataactaaaattacaaaaatgacacgtcgacgcctttttcgcttctttgccttttgtttctttaaataagcaagaacttgatcgcgatcataatcgttatatatattctgttgttgctttctttttgccatacactactcccaattaatcaatccaacctcacgtcttaacttaactccaaatttttcatttactttctcttgtactaacataatcaaatcataaatatctttagcactggcatagccattatttacaataaaattagaatgttttggcgaaacttgagctcctccaatttcatagcctcttaagccacattcatcaatatactgccaagctggtttatcttgcggatttctaaatacacttccggcacttggcatattccaaggttgtgaagacattcttcgttccttacgtttatctaaaacagctttaatctcatcaggacttttagcagtcaattcaaacgttacttccaaaacaatcaattttcgattatcttgacaaattgaatgacgataagaaaagtccatctgttcattattaaaagtaacaacttcatgcttttcatttaataatgtgaccgtctttactacacttgccaggtcatacttatatgctccagcattcatatatattccaccaccaattgagccaggaatcccgcccataaattcaaaaccgcttaatccaattttagcagcttgatatgataatgaaatcattggtacaccagcttgagcaatcatcgtcgaaccattgaccttaatctcattaaaacattcgttgagagaaataattaagccctcatattcacgatcagagaataataaatttgaaccccgaccgattactaaatatttaacccgatgcttaccacaatatttaattgttttaatcagactatcaacatctttaacttttaaataaatacgcgctggtcctccgactttataagtggtatgtttatacatcggctcatcttcaatcatctcaccaacatctaatttttctaaatcttctttaacttgagaaaatttcattctatactcctacatttctttaattaatttataaatatctctacatgcatttggtttaccaagagccttggcacttttttgcatactctcttgaacaattttattctctaaaatataatccactttttccacaaaatctttactattaagattttcctctaaaatcatcattgctgcattacgatcagctaattctcgagcattatactcctgatgattagcggcaacataaggacttggaattaaaattgctgggatccctaccgctgtaatttctgccagcgtagaagcaccagcacgagaaacaaccaaggttgtattctttaatactgatggcatatcatcaatatacggtactaatttaatattcttatttaactttcctaattttgttttcatctcttcaaaataaggcttcccagttacataaagcacttgataattcttttgttcaaaagtctttaatgattttaacatcatttcgttaacagattttgaacccaatgatcccattacaatagtcactaaaggaagatttttatttagatgatattttttaaaaatatcatctggtttgattgaggcaattacactagcacgtggattccctaatttataagttttatctttgggaaaattctcatatgctttatcataacaacatacgattttatcaacatttttaattaaaattttatttgttaaaccaataattgaattttgttcatgaatcattgttttatatcctaagcgattagcagcttcaacaacactagcactaggataaccaccaaaaccaatgacaatatccggtttgaattttttaactatttttttcgctgtaaaaattgatttaacaaaaatagcagcagcaatcccctttttaataggatttccaactaacccgcgaacatttaaaccaatatattcatagccttgttgaggtactacttctgattcaatacgatccttagttcctacaaaaagaaactcactatctggttctacttcttttatatattcaactaaagctaaggcagggtataagtgtccacctgtgcccccagctccaactattactttcatcatctcacctctagacactagtataacattaatatgttgattttgaaatatttaatacaattccaattgcaataagcgtaatcgtcaatgacgatcctccgtaagacattaacggcaaagttactcccgttactggaaataaaccgacaactactccaagattgatcaaagtttgaattccaatcattgaaataattccaatcattaaaaagctgccaaataaatcttttactttagttgcttgattaaagacagttacaaacatataaccgtacattccaactaataaaacgcccccaatcaatccaaattcttctaaaaatatagcaaaaataaaatctgtttgtggttccggtaaataaaaatgtttttgcacactattattaaagcctactcctaaaatcccccctggtgcaatcgcataaagtgactgaataatttggaaaccacttcctaagggatcggcaaaagggtttaaaaaagctacgatacgtgctaaacgatatggagccgaaataatcataataacgattccaattacccctaagatccctaacataacaaaatatttaaatggaaatggactaacgatcaacatcactacaattgaacaagccattacaacaccactaccaaaatcaggctgaagcataattaaaccaaacccaagtcccaaaatcaataacaacttcaaactagcttttagtttctttaattcatgataatgattgttaatatagtttgcactataaataattatcgcaattttaaacagctcagatggctgcaacgaaataatacctaaattaaaccatgagcgcgaccccccgcgaactgctccaatccccggaatcaaaactaaaatcatcaagataaaagacccaatcaaaagtttatttgcatttttttgataaatatgataatcaatctttgaaaacacaaacatagcaattataccaataacagcaaaaattccttgtcgtttaatgtaatataaagaatcattaaatttatatccggcccaaatattcgaggcactatataccatcatcaacccaattatcacaattattaaaactgtaacgaccactcttctacgtttcatatacttacctccattttaagtatatgaaaaaatattttaagaaatgaaaaaaagcttatcattcctgataaactttttatttaatcataaccttgatattcctttttaaatcatttaactgcttatcatacgttgcttctttagctaatacctttgctctttcaaaataatcaattcctccaaatcctctaaaatatacaatggtataaccataattactcattaatacttccaaatctccaacttgtcgagattcatcaaaaacccaatttgcaatttcaatagtactatcccctttagatatattgtcataatctccctgattgttcttatcatctgcatatttactattatattcatgaaacttatcaatcgatctgtcagtattattcataaaatcttgtagcaaattatctgcaaattctttacatgtattcattttttcggttgtcaaattatcagtatctgtttctctagcatctaaataaactgttgaaatactagcttgtcgataaacaggctgttctctagccaccagcataactacatcaatactagaatccccttcaactactttaacactattaattggtaatgcctgatcaaataatacggattgcaaatattcaggtaaatctgattttcttaaatcttgacgtagactcaaatcattattttgataataaatttttttatcatcactactataatcaactgccatctgtttaaaatctgcctcactacgaatcttttgggcaaactcatctgcttttgctttatcatccttagcaaaagcaaaatagcgaatattgatcgtatcaatatcatttttattagctagataatattgctccacctcttcatcagttggttcttttaataaaactgctgcatatcgtgaggccagattagcttcctcataataactgattaaattatcctttgttgcctctaaaccaaaggttgaatggagataatcttcaaaatcaatcttattttctttacaataactttctagttcaccaaatgttgagcgagctttctttttatcatcagcatttatttgataaccagcagttttagcacctcttaccaatgcctctacttctaaaatatctttctttgcctgatcagcaaaataatattcccatgatttgtctgtataaccagtaaccgtacaatcttgattttttaaatcatttatatccttttcaatattaaaatcaactatacttgcataatcatcactaaaagcactgtaatattggtttaaatatttagtcaaagcgcgaccatagaaaaactcaaattttgcttttggcacctctttatcatctagtttcattgtatagccaactttcagatttcctaaataattattttctggttctttggaacaacctattatcaaagctgccagtactagcaaaatcattaattttttaagtattttcatatgctcacctcaattaattatagaggtatgctgaaccatacctctatatcatctttatcattttattttactgcttttctttttttagttgttacatatgcagttaatcctgccactagagcaacggccccagccagcattgttgtgtttaaattaatttcatcaccagtttttactgaagtagtaggtttatcaggtgttggtgtaggggtaactgttgttgtatctgtagttggacggtctggattatatgtttgaacacgctcatcatcaataattcctgaccagtttaaaccataggctacatcataagtatttccttgtgtatctttataacatactagatcaccagcaacatcttctttattcgcttctacagtatccatatttgcaggaaattgtaatggtaataatccttttggttcagatttaccattaataatatcaaacacagcactatcacttacagagaagccacatacgattgcatctactttgtcttcaaattcactaacgataacaggaccattagcatttaaagcaacaactacaggaatatctttattgactgctttagctgcttctacagcttctaaacaagctgttaaatcgtattcattagcaattttactagttgctccataataagatctattttgttgggtaccatcactatttaaatctccagcaattgacacttttcttacgttttcgccatcagcagtatatgggcggtattgcaatgataatggataaaatttttgtttaccatcttcaacgatcatacctgattgattaaataagcttccgttatttggagaacgcattccaacaattactttatcaacatttgataaatcaggtcgtactactttatcatcaactatttcatcagttaaaactgttccatagatagatttagctgtctcaatattcattgaatctgaccaagatgcaggtgtatcaccaaaaactcctttttgttctgcagtatatgttttaggaatataaacagtcatatctttaggatcttttgcttgatctttagccgctttaattgtgttatctttattctttaacataaccactgactctaactgagcttgatatccagcgtcttttttatctttacttccagcttcagctaatgattcatctaaattcaaataagtattttcaaataatcctggttccattgttaatttcaataaacgtttagctgaagttgcaaagcgagtattagcagcttcttcgccatcacgatcaaccatttgctgccatgaccaaacgattggcttattgtcattattaccaccaaacatgtcaccaccagcatctaagattgctaaatgcctttcgttatcagtagcattttccattccccaagccattcctagaccacctagtgctaattgttcagggggcgtgctagtaacaccccagtcagtacaaactacaccgtcaaagcctaaatcatctcttaaaatactcattttagacttactataagctgaaccaactctttcgccacctaaagcactaccgtcagcattgattccaattgaataagatgtcatcactgcagttgccgctccagttttccctttcaattttaagccaccttgagcaaaaggagttaaatgttcttcaaaattaccacctggataaactgcatatttacctgcacggttatgtgattcacgaccaccttcaccggctccatcaccagggaagtgtttgatcatacagttaattgaatcttttccccatccttgatcttctccattaacatatgttgattgtgaaccgtctacataagcttgagccatatctgtagatagtttagtattttcaccaaaagttccaccaactcttaaccagcgtggttctgtcgctaaatctatttgaggtcctaaagctgttacaattcctaatgcacgatattcagctgaagatgcctttgcaaaattatacatatgttcagtatcaaaagttgctgccaatccaatattagaaggccatttagaaatatctgtagccccactagaaacattatcagaatataaatctcctgaccctgctgttgaacgaggatcagaactaaaatcaacaggaacattgaaatcagatatttctacatactcttgcatcgcattgacccaacgtactgaatcttccacatcatttcctgctgcatcagtaatatttctaacataactatttgttaaataatctttttgtgaatctgttaatcctgcagcactatttccttcatggctactaaataacattaatccagcaatctttgcgatcccatcttcaccttcagcaaccaatgcatcagcaagatcttgtgctcttgtttcagcatcaagataccatctttcataatcatcgatttctccatttaagttcatatctttgaaagcatattccttaccatcgatattttcgcttaacaacgccgttttaccagcttctttagctttttcatcaaaagcttttgaataagtcaaagttggagctgcttcacctttataatcaggattagttactaccataatatcaatatcgtagtcactaaattgagcgttttctccgcttccttctgttttcgcagcctgatattttgcttccacaacagaatattttgataattctactgcatttaatgcaatcggtgttgcacttccgataatacagccggcagctgataaagcagccaatgtttttgtaagttttttcttcttactcatcttcgattttcctcctcgtttaaattccctatgcttctagtataaacgagaagtcgatgaaagcgtttacttaatcatcgacaaaacacaaataaagtttaaccttttttgttttcgtgaaaaaaagtattttttcttagaccaaatttataaaaaaaataaatctatttataaaattcttaaattatttaatatctataaaaataataagtaatcattttataaattaaatcagcaattgctaaacgaataaaatattcattaaatgaaaaaggtattgttagtgttgtaacattatcataattttgaactgacttttgaccaataaaaataactttacaattagtttgcataattctttctaatccatataccggttcaatagtttccttttcaataaacccatcaaatgaatgaactccgttagtaataattattaaactttcttgatcaatcaaagctaactgttcctcaaaatcctttttatttaaagatttaggaaaaatcaattccttatgatataaccccaataattcttgaaaatcataaaacagcggtaattctcgaggttctccaaagacaaagatattatttgcttcattaatttgtttagcgaatatttttattttttgaaatgtaacaattttttgtacttcactaaaatattcatcgtttagtcgaacatactcatttaaattatcttttgaaaacattaagtttgcattcatctttaagcgatccaagcgaatcttttcatcgagacattcttcttgaaaatcactgcaaaagactttccaagaatcatatcctaaataacggcaaaattttaaaacagatgtttttgaaatcaaggtatcttcaacaactttgctaattgataatcgattgatcgtatcacaattagctaataaatattttgctaacgaataatgaatattttcattttgattgtaattgattaattgatgtaatttaattaagattgatcccactattatttccctcgacaatactttaaattatactcaatataaattaaatctaagatcaatatcgtataataatcaaaatcaacaaaactatttttattagtcgttggaatgtagagataatgattgatgtattgaagtgagctataccgattactgcagctaataactgctttcttgccagcattattacaaattaaattaaacttggacttacattcaccaacatatcttccagaagcagttaaaataatcgctagatcgtcctcattcattggctctaaataatcactttcactttgaaaatcactataaactgttttaccaatactgatcatatttatttggaaatcaactgccaatgataatggatatactgccccaaataaataaattctactactttgattaattatttcaactagtgcattgatctctttttttaaattatttttaaattctaaactatcatttttagcaatataacataaatgatcatagatactttctatatcaatattactaaaacgactttcaatttgctgttctttaactttttttgttttaactaaaaagctttgaaaattattccaagaatgaaaaccaaaatattcacaaaatctcgttacactagctctcgaaacataacattcatccataatatctttaagcgtaatattttggcaataactataatttttaataatataccgggctatttcgtaaatcacatctttttttacacatgaattgatatagactatcaatctgctgagtaatgtattcatgccttcctcctttataaaataatatttatctataaacaggtagcactgaaacgacattaagataacttacgattacccataagcttgcaatttttaatgttaccatgcatatacatataattttattatataatgggaaattttcaaatagaaagtttttcataaattaaaaaagacactttcgacaataaaataaacctttaagctatattccttaaaggttcactttacaaagcatcttctataatttattaacaatatttttaaatactcgaccacgttcttcatatccagaaaattcatcaaaactgctggttgatggcgaaagtaaaataatatcgccagcttttgctttctcgattgccagcaaagtcgctgcttctaaattctcaacagaactactgtttgcaacatgcatatcatttttaaatcgctctccagcagcaccaaatgtcaccagatgactgattttattaccataagtagccatttcggttaaatctaaccctttatcaaaaccacccatcaataaaattactggttgttcaaaagcttttaaagcaatgatcgtagcgtcagtattagttgcttttgaatcattatagattttaactccattaatttctctaacaaactcaattcgatgttcaacaccaataaatgaggcaatttctcgattgatgactgttactggtacatcacattttttagcaatgcagatagctgtcataatattttgaatgttatggcgtcctacaactttaatatccgctaagttaataattaattcatctcgataatagattgcctgttctttgatcatacagtcagcttcatgtatcaatgacattgtgacttgattacatggaactggatatttttccaaatactccattactgttttatcatcaagattaaccacaaaataatcatcaagatcagtattcttataaatatttgttttagaagcataatactcatccaatgaggccatataatctaaatgatcgggtgttaaattgatgatcgttgagacataaggcttaaatcgttcaatatctaataactgaaagttactcatttcaattactacataatgattttcttcattaagaagatcattatctaaaacaacatcacatagtggtgttcccacattacctgctaaatgaacatgttgatattgtccctttaatattttatcaattaaagtaactgttgttgttttaccattagtaccagttactccaatataatgttgttttttagcaacttgaaaagctaattcaatttccgtatatacaggaatctttctttccttaagtcttaaaataaatggcttatgataattaattccagggttcttaattacaaagtcaaaatcacattcaaataattcagttgggtgtgaccctgttaccatttcaattcccatatcaagatattgttgatattctggaatatccttaatttctttagcttcattaaccgtaatcgttgcatttaatttatgaagcaatctaatcgcagccttaccacttttagcaagtccaatcactaataccttttttccagtaaacatattctatagcaccccaattacaattgataagattccacagatgaaaccaatgaaccagaatgaaatagttacttgttgttcactccagcccaacatttcaaagtgatgatggatcggtgccatcttaaatactcgttttcctcgagttttaaatgagactacttgaataataaccgataaagtttccattaaaaagactccaccaactaaaataagtaataactcttgttttgtaagtatcgctaaaatagccaagaaaccacctagaccaagcgaacctacatcacccataaatatcttagcaggatgataattaaacatcatgaaaccaagtaaagcccctaccattgcagttgcataacttgcaagagtataatcttttgtcatgatagaaaagattataaatggtgcaatcgcaaccattgaaagaccagttgctaatccatctaaaccatcagataaatttacaccgttactttcccctgcaaacattactaagattaatgctggatataaataacccatatcaatattaatatctaataatggaattgtaattactgatgtaaaatcaggaataaagttcattgcaaagaaataacaaataattgctaacgcgatctgagctaataatttagctagtggcggtaatcccttattactatgtttaacaatgatcaaagcatcatccacaaatccaattgcactatatccaactaaaacaattgttgctaaaatcagctccggatcaagtaaattattaaaattaacaataaaagcaccaagaattgcggcaatcacaaaaacgattccacccattgttggtgtaccattttttgacttatgtgattcaagtccttcttcacgttcaacttgaccaaatttcatcttatgtaggaatggaattactttaggcattgctagaacaacaagaataaagccaattccaaaagcaattattagttttaagaagttttccatctatatgtccccttttttataaaattcgtctttactatatcatattatcgtttaataggcaaaataaaagggacaagagtcccaattattaaattgttttacccactaattcctagatccttcattaattcaagggcccgtttaataactgcgtcctcatcttctccatcagcaataatttcaatttttgcttttgttggaatacccagagatagaacccccatcaatgatttcatgttgacagttttagatgcgtagactaacttaatatcactgttgaacatcttcatagtatcaactagttcggttgctggagtcgcataaagaccaactggatcagttacggtaacgtcgattctttttaccatattgcttacctccttaattacttatattataacattgttacctagttattgcatctaatataattatcttttttcaatttgaattacgtatggagcagataacttattcatcattttaaacaacgctacattataacttatatgatctaaactggcgacatattcctcaattaacaaactttctttttttccctcatcatgaccaatgtaaacaactaaaaacaattctccttttcgattcaaatattcaactgctttttttattgcttgtaaagaactgtcagccatagttgtaatttgatgatctccattggggagataaccgagattaaaaattcctacatcaaagttttttacatagcaatcaaaattttcatgagaagctaaaatcaaatttacattatcagtatcttctatcaacttctttgtattatttaaagcttcctgctgaatatcaaaactataaacttgtttagccactttacttaaaaataaagtatcatgaccattccccattgtaaaatcaattgcaatttggtagtcttttctcttaattcgattatgcacatattcaatcatcgtttccatattttcctatactcctgttacattttgtgtaatctattacaatcgtttttattttaacacatttagctaaaaaaatttgtaccaacctatttttttggttataatgagactgtaaaaataaggaggattaaattatatggctttaagtaaagattttttatggggtggcgctttagctgctcatcaatttgaaggtggggttttaaatacctcaaaaggatatagtgttgctgatgtgatgactgccggagcacatggtgttcctcgccgtattactgatcaaatcatggaaaatgaatattatccaaaccatgttggaattgacttctattctcattacaaggaagatattgctttatttgcggaaatgggatttaaatgctttagaacatctatcgcatggactcgtattttccctaatggtgatgaaacagaacccaatgaagaaggattacaattctatgatgatgtttttgatgaattattaaaatatggaattgagccagttatcacattatctcattttgagatgccttatcatttagcaaaagaatatggtggttttatgaatcgtaaaactattgatttctttgttaaatttgctgaagtatgttttaaaagatataaagataaagttaaatattggatgacttttaatgaaattaataatcaaatgaattttaaaaatgatatttttggctggactaatagtggtgctcattttggagattatgataatcctgaagaagcaatgtatatttgcggtcatcatactttattagcaagtgcattagcagtaaaaattggtaaacaaatcaatcctaactttttgattggaaatatgattgcaatggttccaatttatccattttcatgtcgtcctgctgatatggtattatcaaatcagatgatgcatgatcgctggttcttctgtgacgttcaatgtcgcggtcattaccctgcatatgctttaaaaatgtttgaacgcaaaggctttaatattaacattacagaagaagataagaaaattcttgctgaaggaactgtagattatataggatttagttattatatgactaatactgtagattcaactgcacatcaagatgtttctaaagcaactgatggttcaagtgagcattctgttaaaaatccatttattaaagaatctgactggggctgggcaattgatccagaaggattaagatatgcattgaatattttttatgaaagatatgaaaaaccattatttatcgtcgaaaatggttttggtgccattgacgttaaagaagctgatggttcttgccatgatgactatcgcatcaactatttaaaagctcatattaaagaaatgaaaaaagctgttgaacttgacgggattgatttaattggttataccccttggggatgtattgactgtgtttcatttactactggtgaaatgaaaaaacgttatggttttatctatgttgatcgtgataatgaaggtaatggtactttagaaagaagtaaaaaagattctttcgaatggtataaaaaagtaattgcttcaaatggagaaaatctagactaaaaacaataagataaaagttacttttctaatatagtaatcatgtttataatatcttaagctgaattgctcattacagaacattatttctgcaacaaagtatattatggcatgttttaacacttattaataagaaaatatttttattcttttaaaattgataccggactgttgtaataacagtctttttctacgtctattgctcctcttaatcaaaacatcctgttactagcaaactgtttttctaatctaaaaaggcgacttctaaagatttaaatgtcgttccttctacttatcgatgtatctattagtccacctttctttttttaaaccatacataatcccaatcaaatcagctaaaaaccagccaattggaattgcccaccaaatcgccaaagttccaaataatggtgctaaaagatatgctaaaacaacacgtgtccctagcgaaataacagttaaaactacagaaattcctggtttaccaaccccacgataataaccatacaataaaaataaacatccaattcctaaataacaagcaccttcaattcttagatactgagccccttgatagataatttcagactttgaagattctatgaagatcagcattagcttatcagcaaagataaagactaaggcagaaataaaaatacaaaagatagaagccattacaactgctactttaaatcctttatgtattcgttcttctaatcctgctcctttattttgagcaatataggttgaaaaagcattaccaaaatcttgaactggcatataagcaaatgaatcaatctttacagcagcagcaaaagctgacatcgttactaaaccaaaactatttactaacccttgaatcattaaaatcccaaaattcattactgattgctggatacaagttaataatgagtacgctttgattttctcaaatatttcacgttcaaaatgccaatgttttcgttgcggtaacaattctttttgacttagaaagacataaagcatgataccaatagcactaaaagcttgggcaatcaatgtcgcaacagcagctccagctacccccattgcaacttctgccactaaataaatatctaatccaatatttataattgatgctaatgctagaaagatcaatgggattttagaatttcccaaagctcttaatagcgaggaaaaataattgtaaataaaagtaaaaactagacctagaaaaattataaacaaatattgatgggtatccgtaaaaatatccctaggaatattcataaaatttaaaattagatcaattgctaaaagacaaactatttctaatccaattgaaaaaatgccgattcctacaaaagagacaaaaaaagatgttttcattttatctaattgtttagccccatagaacatcgaaaataaaattccactccccatgcaaagacctaagataatggaagttaaaaaagtcataatcgtaaaagatgagccaactgctgccagagcatcagttccgatataatgtccaacaataaaagtatcagctacattataaagctgctgtaaaagatttcctaagatcattggaattgaaaatttaattaatgccctggtaatatttccttctgttaatttccctatcataaaatcaccccattacttacataataaatatatcatccaataaagtcaattaaagaaaattatgtaagatatttatcattcttatcattatttccgttatctttattgatttcgtagtataatatatttataaataaggaggtcgatatagatgacatttaataaagattttttatggggtggtgcaattgcagcacatcaagctgaaggagcttggcaagaaggtggaaaaggaattagttgctctgatgtcgaaacagcagggaataatgtaactggtgcgccaagacgcttaactgatggcgtcatcgaaggagaagattatccaaatcatgttggggtggatttctaccatcgctataaggaagatattgctttattcgctgaaatgggattcaaagcatttagaacttctattgcctggacacgaatttttcctcggggtgatgaagaaacacctaacgaagagggtttacaattttatgatgatttatttgatgaatgtcataaatatggaattgagccaattataacattatcgcacttcgaaatgccttggacgcttgcaaaagagtacggtggttttagaaatcgtgaagcaatcgacatgttcgttaaatttgccaaagtatgctttgaaagataccagcataaagttaaatactggatgacttttaatgaaatcaataatcaagctgatgtttctcagcacaacttaatccaagaaggagctgtacttttaaaaaaagatgatgatgcagaatatttaatgtatttatctgctcaccatgaattagtcgcttctgctttagctgttaaagccgctcatgagatcaatcctgatttacaagttggatgtatgattgggatgaatgctgtttaccctgcatcacctaatccaactgatgtaatgaacgctttaggagcaatgcatcaaaaatactggtatgttgaagtccatgcccgtggtcactacccaaatcatatattgaaaaaattcgaaagaaaaggttatgattttattactgaagaagataaaaagattttatctcaaggtaaagtggactatattggattctcatattacatgagttttgcttcaaaatatcaaggacgtaatgaaaaaacatatgattatttcagtgaggactttgttcgaaatactcatctaaaagcttcagactggggttggcaaatcgatccactaggattacgctggtgcctaaactggttccatgaccgttttgagttaccaatgatgattgttgaaaatggttttggtgcttatgacaaagtagaagcagacggaacaatcgatgatcagtatcgtatcgactatttagcagcacatatcgaagctatgagggatgcagttgactatgatggagtagaattattaggttatacaatgtggtcaccgatcgacattgtctctgcttctactggtgaatatgataaacgctatggatttatctatgtgaattacaataataatcatgaaggagatttttcaagatgtaagaaaaaatcttttgactggtataagaaagtcattgccacaaatggtgaagatttaagtgaataaatgtaaaacggtatggacagtcataccgttttattatgcaactatttttaacattcaaggcaactttgattgatagacaataattgattttaacgtataatcctaaatataggaggtatgaaaaatatgcttagtacgaatctcgtttggcttagaaaacattatcaatatactcaagaagaaattgcacagcaagttggtgtatcacgtcaatctgtagcaaaatgggaaagcggtgaatcattgcctgatattgacagctgtatggcattggcaaaaatatacaatgtaacaattgataatttaatcaatcatgatgaagatgatgctggaatcgtaattcctcccaaaggaaaacatttttttggagcagttactgttggtgaacgtggacaaatcgtaattcctcaagaagcacgtcgaatctttaaaatttccgctggtgataaaattttgatccttggtgatgaagaacgtggtctagctattgtccatcagcgtgatgttattaactttgttagtgaattaggagtacccaaaaatgaaaaggactgattatcatggaaatgattgaaattaaaaatttaacaaaaaaatataatgataaacttgctgttgataatttaaatctatcaatcaaacaaggaaaattactagctctattgggagtaaatggagccggtaaaactactacactcaaaatgttatcgggtttgattcaaccaacaagcggtgatgctagaatcaataactatagcattgttaatgaaagcctctttgttaaagagcttatcgccgtttcaccccaagaaactgcaatcgcaccgaatttaaccgttagagaaaatttggaattaatggcggaaatccatggttttaaaaaaactttaatcaataacaaagtcatcgaaatgattaccgcttttaatttgaaagatgttgctgctaaaaaaagtaaaaaactatcgggtggttatcaacggcgcttaagtattgctatggccctaattagtgagccacaaattttatttttagatgagccaacactaggacttgatattttagccagagaacaattatggcgcacaataaaagcactaaaaggtaagattactatcattttaactacccattatctcgaagaagccgaagctttatcagattatgtttgtattatgaaagatggtaaaatcaaagccctgggaaccacaaatgaactaattaaattcgccaagacaaccagctttgaagatgcctttataaaacttgcaacaggaggaactgaaaatgagaacatgggcctttgctaaaagaaccacaaaagaaattttacgtgaccctattaatattatttttggtttaggttttccaatcgttatcttgttactattgacaacaatccaaaaaaatattccagccacccctttttcactaaaacaattaacaccaggaattgcagtatttggcttgtccttcttatcattattttcagctacattgatctctcgtgatcgaatgtcatcattattagcacgattatttactactcctatgacagctaaagattatattttgggatatactttaccattaataccaatggccttgatacagactttactttgctatctagcagcattttgtctaggtttaaaaataacacctgatgtcattattgccatcttatgtacaatccccatttcaattatttttattacaatcggcttattttgtggcactatttttaatgatagacaagtcggaggaatctgtggtgccttattaactaatcttaccgcgtggctaagtgggacatggtttagtttagatttaattggaggcttgtttaaagatattgcgtattgttttccttttgtccatgctgtagatatggcacgagatggcttaaatgcgaattatcacgcaatgcctaataatttattctgggttttaagctacgctggactcctcttaattgcagctgtttcattatttaaatataaaatgaaacataattaaaaaactctttttgagttttttgctttctattaatatattataacgattttatttctttccaaaaactaattaatttcgtcaaagaataactcgcattagctggtgaacttgatggtaacttagtaacaggaagatcaataatttcatcgaaatagcgatgatacaatctatctgctaagttcccatttgtataaatatgcgtaatttgactttgatcaatgattttctttagatcattgacttcaacatttgtaatactactatcactcgaacctttgatttcacaactagcaattacatcccacacagctatatgttgatttattaaaaattctttcttttcaataatagtctctggtaattcagtattataaatatttgcaagaattttccaaaaacgattctgcggatgatgataaaaaaagttggcctcccgcgattttactgatggaaaagaacctaaaattaatattttagaacttttattatatacaggttcaattaaatgatattctctcataattccctccctttaaatcaataataacattgttcctgcaacgatcaaaatcaatcccgccacagccttttttgacaaagactcttttaaaacaaaatacgaaaagataattgtgacgatgatactcagtttatcgattggaaccacaatactagcctcccctaattgcaacgctttataataacagatccatgataaacctgttgtaattccagaagaaaataaaaaaagccaattcttttttgtaatttctttaattgtatgataacttcgctgataaaaaacaatcccccaagccataatcaatactaccgctgtacgaataaaagttcccagattactatcaatattaagcattgcaatcttagcaattatagccgtcaaagaagcaaataaagctgaagccaaggcaaataatagccaatggttatttgtcactttatttacaacctgctttttttcaatcatcatataagttcctaaagacataattatcatagaaattattttaagcatagtaattttttcgtcaaagaaaataaatgctaacagcatcgttaaaattgtactacttttatcaattggtgtaactttgttaacatctcctaattgtagtgccttaaaataacataaccatgataatccagttgcaattccagaaaaacataaaaccaatactgtattactatcaatatattttaattgttcctgggttccagcaaataagaccattatccatgaaaaaattaaaacaattattgtccttaatgctgttgctaaagaagaatcaacattcttcaaaccaatttttgcaagaactgcagtaaccccagcaaataaagctgatagacaagctaatccaatccacaccctaagtttccccctatacttattatatttatattttaccgcaattaacaaaaaagaaaagtgaaacaaactgtttcactcatattattcaattcgtaacattcggtatccaactccaacatgggtctgaatatatttaggatgcgtaggatctaattctatttttttacgaagcgtagccataaatactcttaatgaggcaacatcactctctaaagtactcccccaaatttctttagtaatatatgtatgtgttaatactttgccaacatttcttgagagaaggcacagcaacttatattcaatcggtgttaaatgcagttcttgctgatctaaatatgcacatccgccagcgtaatcaatttttagatcaccattaacaaaatcactactttctatattttgactttgattataattaagccgtcttaaaataacacgtaatcttgctaaaagttcctcaactgaaaaaggtttggtcaaataatcatcagccccagcatcaagagcctcaattttatcacgatcttcacttcgagcactaataacgattattggcatatttgtccaagtacgtactttttttataatttcaaccccatctaaatcaggcagcccaagatccaacagcattatatccggtttttgtgaagcagtttcaataattgcttgttttcccgtttgtgaagtatgatatttataatcatgagtttctaaagttgtagcaatcaaatttctaactgcgttatcatcttctacaactaatacaaatggcttattcatgtatttcaacctccttaatcggcaatgtaaaactaaaaatcgttccgtgaggaatattgtccttaactgcaatattaccaccatgcgctacaataatagctttacacaaagctaaccctaaaccaagtccgcgacgtccgtcaataacctcatgctttacagtataaaacatttcaaaaagtttttctttgtccttatcactgattcctgctccatcatcagcaatttgaatttctacaaaatctttatgcttaaaggtttcaatactaatcattgaaccttttggtgtatatttaattgcattgtcaacaatatttataattacttgaattattaagccagcatctatttttgctaaaataaattcatcattagcctttacctcaatacggtgttcatcctttttatgactaatatgattcaatgcctcatttataacttcctcaataagttctgtttctaaatgcagattcattttaccatcttcaattcttgtaactgaaagaagattttcaaccagattaatcaaccataatgaatcatcgtagattacttcgtataactgcatttttttattttcatctaagctgccgctattatttatcagtacacttgcattaccagaaatactagttaatggtgttcgtaaatcatgcgaaattgaacgtaataaatttgcacgcaaccgctcatttttagcttcaattgcagcttcttctttcttttggttaaaaaactctttttctagagctaaagcacattcaccaacgattgatagtactaaattattttcaaaagcatcaagaataacatcttctaaaattattactactacaccataaatatcattagtactagcaagcggtaaatagtaattcttagcttgatatgttttattattctggtagacccagtgaacattagtttcaatctcatcacaatcatgaacagtcatattattatgatgaaagacttcatgtaaaatcgtatcattttcagtaatttgataaatcatcactgatttatttaataatttaacaatttgtttagctgccgtttctttaattcctgcaatacttttttctttttgcaaaagacgatttgtctctaatagaacttttgtacgatatgcatgttgagcagactgttttgcctgctgttttatccttattgctaaagtactcgtaataaaagcggctatcagcataattgcaaaggttacaggataaccagaaccataggctgctaaagtaaaacgtggattagtaaacataaagttaaaaattaaaacacttaaaatcgatgatacaagactataaatacggttagatgtagttatagcagtaattaaaacacttaaaatataaactgtaattgtatttgcttcactaaaacctaaatgatggaataatatccctatcaaggttgctatcaacagaataaatattgaaatagctaaatctttacccttaacaacaaaattaaaatctctttgctttgatttatctttccccgtattttgatgatagacaatattaatatccaaatcttttagtaaatttaataatttcttatctagccttgaactaaataaatgtttcctgtccttttgactatgtccaaaaaacactttagttactttagcatttttgcaaaattcattaatttgataagcaatatctaaaccaaaagctgtttcgatattagcacctaactttctagccaaattagtattatattggagtctttcgcgatcatccttactaatttttgaattatctggtgtttcaacatataaagcagtaaaaattgctttattttcatgtgctacagcagcagccattttaatcacatcaggattagaagtagatgaagaaagacatagtagaatatgttcttgttgattaatcataatataacctcactcggcttatattataacacaattttgctaacgcgtaatttctttaattgattttgcagtgcccataacaatcaatgtttcatcagcggcaaatacatgatttgttggtggcaaaggaaaaattctcccattctttttagtagctaagatactaacatggtatctcgtcctaactgccttttcgataattgttttattcaaccagctctctggaatcttaatttcataaatcgcaatatcaggtgttaattctaaataatcaaaaacattttttgctccatatttaattgctattttttcagcaatttcccgttctgcataaacaacatgatcagctccattgcgaagtaataatttacggtgaacatcacgactcgctctggcaattatatattcagccccaaaatcttttaatagtacagtgatttctaaagccgtttgaaaattatcgccaactgcaactacacaaatatcaaaattattaactcctaaagatttaataaaatcttcattagtcgcatcaccgatttgaatttcattaacaatattaaccgcccaatcagctcttgtttcatctttttcaattgctaaaacagcatttccttcttcaataaattttcttgacaaatgacgtccaaaacgtcctaagccgattactaatacagatttcatagttcctccatcatcctatttgaattttttcagctggtgcttttgctaatggcgtcaccctattcgaagcaaaagcaagcaggaacgtaattgaaccaactcgtccaaagagcattaataaggccaatagacactgtgaaataacgccaagttgtgaagttattccaatcgtcaatccaacagttgctatagctgaaacacattcaaataataccgttatataagaaatattttcaagctgacatataatcaatgaaacaatcaaagtcaacactaaatatgccattaaaacacaacttgccatttttactatttcatcactaattcgccgtttaaaaacttcaacacctttcttttgtttaaacatacttataatgttaactagcattactgcaatagttgttgttttgattcccccagcagttgaacctgaagaaccacctacaaacattaatataattatgattaattgtgttgtttctctaatcttcgataaatcaactgtattaaatcctgctgtacgagcagttacagattgaaataacgaacttaaaatagttgcattcccctgctcacaaaaataaataaatagtgctcctccgaatattaaaattattgtggttgtaataactattttagtatgtaatcgcattttagaaaaatgtccacgattatcaataatatctttccaaaccaaaaaacctagacccccaataatgattaagagcataataatcatattcagataccaattatcttgaaaagaaactagcgaactatatggttcaaaattacccattaaatcaaatcctgcattacaaaacgctgaaatactatgaaaaattgagaaccacaaacctttaaccaatcctaattttggacaaaaaataaatgaaagaaaaaaagcccctaacgcttcaataaaaaaagtcgccaagataataaattttgtcatttttacaattcccccaacatgtggagaagaaattgaattctgcatgattgaacgactaataattcctatcttctttttagctaatgttaaagcataaatacaaaaagtcataaaaccaataccaccaatttgaatcaataaaataattataaactggccaaaccagctccaatgactatatgtatctacccgaatcaagcctgtcacacaagttgctgaagtggcagtaaaaaaagaagtcattattgaaacttcctggttttctttcaacgagattgggagactcaagagaatcgtccccattaaaataataatacaaaaaccatagaaaataatcttcattggcgtaagaccatgcaataatttctcagttagtttttctttgataggacatcgctccctttacctatactttatcttataagttcactatactaaactattcataaatataaaataaagatttcctcaatagtattaagattgtataaagatagaaattatctttatacaatcttaatcttattagtgaatatcttacgtcatttttatactatttttggtattttatctatagaggtggtagtatggaaacagttggactattaattttaatgattattattttaggtgggggctatttattaaccggttcgttagacaccttattagatcatttgactattaaagacaatcattcaaataaacccttatcaaaataatacttttttaagttaatttaaactaaatttaacagcaatccgatagattgctgttttttagttttattttatactataaatcaaattcatttttttaaacgaactattattaacagtctaaactaattaaaatttcaataatttaatcccttctaattatccttttataattccttaatcagtgtctggatgtaattaaataatggttgatgcgcacgatcaccatgttctttaattaaattaacaattgcactgccaacaattacaccatcagcaatatttccaaaatgcttcacttgtgctggactattaatgccgaatcctaccgctactggtgtatcagtaaccgttttaattgattcaacaattccttcaatatctgtaacaatattgcttcgcatacctgtaactcccattgaagaaactaaataaataaaaccttttgcctgggctgctatttcaagtgttcgctcttttgatgttggagcaatcatagagattaaatcaacatcatatttataacaaatatcactaacttccttactttcttcatacgggcaatcaggaatgatgatcccatcaactccggtttcttgacattttttaaaaaattcatcatatccatagtggaaaactggatttaaataagtcatcaaacaaagcggaatattcgaatgtttacgaacctcagctacaatttcaaaaacctgatcggttgtcattcctttcgataatgctcgtatattagcttcctgaatcaccggtccttcagcaattggatcactaaaaggaattccaatttcaatcaatgatgctcctgctttttccatttctaagatatattcaactgtcattttttgataaggatctccagcagttaaaaatccaataaaagcttttttattattaaaggcttcactaattctactcatgaatatccaccccctgatatctagcaattgcagctacatctttatcaccacggccggataaacaaataataacaatatcttctttatccattgatggtacaattttacgagcatgtgctacagcatgagcactctcaattgcacaaataatcccctctgtacgagctaagtattcaaaagcagccactgcttcatcatcactaactggtacatactgagctcgaccaatatcatgtagattagcatgttcaggccctattccaggataatctagacctgctgaaattgaataaacaggagcgatttgtccatattcatcttgacaaaaatatgatttcattccatggaaaacccctaatgatccagtattgatcgtagctgcagttaaagcagtatcaactcctttaccagcagcctcacagccaatcaactgaacttcctgatcattaataaaattatagaacatccccattgcattacttccaccaccaacacaagccataacagctgttggtaactttccttcatcttctaagatttgttcacgtgcttccttagaaataatactttgaaaatctcgaacaatcatcggaaatgggtgcggtcccataactgagcctaatacatataaagtatcatcaactctttttgtccactcacgcatcgtttcattaacagcatcttttaatgtcattgttccacttgttacactatgaactgttgcacccaacaactccattcgatacacatttagagcctgacgatcagtatcttctttgcccataaaaatttcgcactctaaacctagtaaagcggcagccgtagctgttgcaactccatgctgaccagccccagtttcagcaataacacgagttttccccatcttttttgccatcaaaacttgacctaaaacattattgattttatgagatcccgtatgatttaaatcttcacgttttaaatatactttcgcaccacctaaatcttctgtcatttttttagcataatataacaacgatgggcgccctgcgtattctttcaataatttttctaactctcgattaaactcaggatcatttttataaaattcatatgctttttcaacattatggatttcattcattaatgtttctggaatatattgacccccatgtattccatatctacctgtttccattttttgttctccttactatttctataattttattacgatctttgattccgttagtttctaccccactactaacatctattccataatcagctttactcattgcctcatctaaattatctaaatcaattcctcccgctagaaaaaatggtttatctaaatctttgattagtgaccagtcaaatgacttaccgctaccgcttattttactatccagtaaataataatcgcattcataatccaggttattaagatcatccttttcaatcaccttgatggctttaataatcggcatctgcactgactgttttaactgcttaatataagcattatcctcatgaccgtgaagttgaataagatcaatgatccccattttaacaatagcagtaatttcactaatttgttcgtcaacaaataccccaacagcctttatatttgaatcaagtttattttttaatttttctgcttgatgaatatctacttgccttttacttttagcaaagacaaatccaacataatcaggttttgcctcatttacataatctatatcttctacttgaaataagccacaaattttaatttgcattatccggtttacgtaatccttgtaagatttcaaaagtcttacgtttatcatgagatcgcattaaagtttctccaactaatacagcatcaacattattttcttctaacgtttttatatcatcatatgtcttaatcccactttcagaaacaaaaataatattttctggtaccatcgaacgtaattcaatactgttatttagatcaacttcaaaatttctcaaatcacggttattaacaccaatgatcttagcaccaacacgcaatgccttctttacctgcattgaactatgggcttcaaccaaagcactcatccctaaacgctctgctaaattcaaacagcgcattagcgttatttcatcaagaatactgcaaattagtaatacggcatctgcacctaatagtttagcttcataaatcatatattcatctacaacaaaatcttttctaagtactggtattttgactattttagcaatttcagctaaaaagtcatcatcacctttaaaaaagtcgggctctgtaactactgaaattgcagctgcaccaatatcttcatattcctttgcaatacttttataatcaaaatttggagcaatcactccttttgacggtgaagcccgtttaatctccataatataagaaattccagctcttcttaaagctcgttcaaaaggataatctttattaattggcttatcaaaagccaatttagctaatttttcaatggaattacgttttttgttttctgctactctttccaaagttctttctacaatatcatcaataatcattttaaaactccttctacatgttagttttgttaatgaactcctctagtttagctaatgctttaccatcatcaatcaatctagcagctaattcgattccttcctgcattgtttttgtacgaccggcaatataaatagcagctcccgcattcaacaacacagcatcacgtttaggtcctttgacaccacttaaaatatcccttgtaattttagcattatctttaggggtaccacctactaattcttctttgcagcagcgtgttaatccaaactgttctggagttattgtataacgagtataagtaccatctttaacttcgcatacacttgttggggctgataatgatatttcatctaaactatcttgtccatatactaccatggcacgtttaactcctaaattagttaagacttctgccaatggttcgactaatgcctcttcatatacacccattacctgcatattagcacctgccggattagtcaaaggccctaaaatattaaacactgtcctaattcctaattcccgtcttactggagccacatatttcattgcaatatgataattttgagcaaacaagaagcaaatattaatgtcatttaatattgtagcacttttttcaggagttacatcaatttttactcccaaagcttctaaaacatcagcagcaccacatttagagctagctgcccggttcccatgtttagccacttttacaccacttgctgcaataacaagagaagatgtcgtagaaatattaaatgagtttgaaccatctccaccagtaccaacaatctccaaaacatctttatcatttagtagtttgatacagtgttctcgcattcctgccgcactaccagtgatctcgtcaattgtctctccttttaaacttaaggctgtcaaataactgctcatttgaacatcactggcttcaccactcataatttcattcatacagctacgtgcctcaccggcagttagatcaaccttcttcgataattttaaaatcgcttctttaatcattttcttttacccccaaaaagttttctatcatttttttaccatcatcagttaaaattgattcaggatgaaattgtaacccatatactggataatcaatatgcttaactgccattacttcaccatcttcactcagtgcaatggctttcaagaccttagctaaagtttcccgtttaaccgccaacgaatgataacgtgcgactttagtttgctgtttcaacccttgaaaaattaaatcatcagtcattttgataatcgaacttttgccatgcatcaattctttagcataagtaattgtactaccaaaggcttcacaaattgcttgatgccctaaacatacgcctaagataggttttttattataaaaatatttaattatttcctcaatatttcccgcctcactaggttttccaggtcctggcgatattacgatcgtattaggatctattttttcaatttcatcaacagtcatctcatcattacgaattactttaatatttggatcaattgaaccaatcaactgataaaggttataagcaaaactatcataattatcaactagtaaaatcatcagtcaattcctccatttgctgtatttagggcgctaattacagcttgtgccttattcaaacattcttgatattcaatttctggaatactatcataaacaatccccgcaccactacggacatatactttttcattctttttatacactaagcgaattgcaatacaagtatcaagattaccagtaaagtctatataaccaatagccccaccataaattccgcgacgattattttctagttcgttaataatttgacaagcccttattttaggggcacctgataaagttcctgccggtaataatgcatcgattgcatcaatcgcatctttattttcaagaatcacccctgagacagttgaaccaatgtgcataacatgtgaaaatcttaatatctcctgatacttttcaactttaaccgtgccaaatttagaaattctaccaatatcatttctccccaagtcaaccagcatattatgctctgctaattccttttgatcagataataaagatacttcaaaatttacatcttcattttcattcattcctcggggtcgtgttcctgctaaaggataagtataaagatttttatcttctaacttaaccaaagtctctggtgaagcccctgcaaattcttgatcatcgctaaaaaaataaaacatatatggagagggattggtcgttcgtaaaacacgataagtatcaaaaagactccctgttacttcagcctctaaacaatttgataaaactacttgaaatatatctccttctttaatatactttttagcacgttctaccatgttacaatattcattttgttcaaataatgctttgaaatcactttttagccttaatggctcaattttagctttaacaccactaataattaaagcttgcattttttctaattttaccaatgcctcatgataacttttttccaaatcatcaactgcaacattagctatcaaaacaattttttgcttataattgtcaaaacaaataacttggtcaaataacatcaaatcgacatcattaaacccctctttatcatcacttttcaaatttaaaaccggctcactatatttaaaataatcatatgcaaaatatcctaccagtccgccagtaaatgttggcaaccctgctatcttaggactttgatattgtttcaaaagcttttttaaataatctttagggtgagttaccatgaactcctttccatcgacattcattaaattatttaaacatgtaatttcacttttaggatcatatcccataaaggtataacggctccagcgttttgtatcatcaacactttcaagcatataacaatgcttactatgtttttttaaaattcgcatcacttcaattggggtgatactatcaccatacatttccttgcagacaggaactaagttgtagtctcctgttttaataatttccttaatctgttctaatgttggataatacatcgctaatttcctcctttgtaaataaaaaaccgtcccgacagaaaataattttctgtcaaggacggatatatattccgcggtgccaccttggttcacgatacaatcgtgctcttagtagatgctatcacatctatgactactgacgtaagtctaacgtcaaagaatactcggctaacgcttttcactttgccctcagtggtccatttaataggctgcgttctacttgattccaccatccaagctctctataagtgcacgatctatttttatctccacttcatcggttttcttggctatatgatataccgatatttttctactgtcaataaaatatcatgattttatcgaatgtttttattatagtacatttttttattaataaaaaaagactgatttaatcaaaataaaaaatcattttttcattgaaagccctttcatttttggataaaatatgctaatataatggtgaggaaaggattagtagaaaggagttgataatatgaatgagatgtatgtaatttcagtgttaatgctttatacattgattattttaatcaatacattgttaaatacatatcgtctgttaacaacaactgagatggttgaagaaaaagaatttatttatcctaaatcttcaatctaccatagggttcatacttatgtagctccaatgatcctaagaattaatatgaaaaaggattacgtactaaataagaaacgtagacccccaattatattaatggctcactaaggttgagtctaatatgaaaaaatagttaatagagtttaattaattttagatataattttaacaaatatgaaaacaagtgagaattagtatctcacttgtttttttatatattctaaaaaatcttcaatatgataattaacaattaattcctttggaaactctacttcttttaagagttcgtcgatttgatcataattttttatatcaaaatgaatatgtgcatcactacctaaaataattttaactcgatgttgtttgcataattgtagcatcttaagtgtattttcacgtgaatttagacgagatggactacgtaaagcattattattcacttccaacaaagtatgatactttttagctgctaaaactactttctcataatcaagtgggcacttaccatcatctgggtgaacgattacactaatatgaggatttttaattgtttcgatcactgcccgtgtattttcttcaattgttcctgcctcataacaatgtaaatgaattcctgccatgcagtaatcaacataatcatataaatcttctgtaatactaagtcttccttgatgatccaaaatattaatttcaatccctaacaataatttaattccctctatctcccgaggaattacatctagatttttgaagtaaattggagcacatgttcctggaattccctggtcatgctctactattcctaataattttatatccttttctttcgccccagctaccatttcactaagtgatgaataagcatgcccgcttgctattgtatgtgtatgtacatctaattcaatattctccatttttatccctccaatggctatatcatagcctatttggtggctaaaaacatctttttttctattttagtaatgataaatttcctgttagtttattaattcgtgtccttgtaccatatagacaaatcccaaaatatttaagcgaagcttcactagccagcttcattttatcaatatattctgaataatcacgacaactttgagcaaggtcacaaaaatcaataactaatacctcattaggataataattagcctgttttagtagttctctgattaaaaactcatcacccttcaaaactggaattgaaatcgttactattccacgatgtatatgttctttcatatcatatacatcagtcccaacgatttccccttctaacttgcctaaagcagttcctaagatagcagttgtattagcaattaatcctagtggcaaatttttatcaactatcataacacattttctatccattcttttgtacctcgcgtttttgagataaaaataatccaatcaaagtcagtactgtcccgatgaaagccattaaagtaatttgttcatgtaaaacaatgattgaagtcactactgtaactactggtacaatgtatatgtagatactcgtctttacagcacctaatatttttactgccatattccaagttacaaaacataaagcggatgcacctaatcctaaaaataagatatttcctaaataaattggattactaaaacgtcctaaatccaatttaaatcctaaaggtatcaatgtcaaaaacataaatgttaccccatacataaaagttcttcttgtgacctgaatcgtactataaccataatcactaattcgtttagttaaaattgaataaacagcccagaccaaagcagccagtaatgctaatatatctcccaatggattcagcttaaaattactgctgccattaaaactaataagcataatccccaccattgcagccataaaaccaattataaaattttgattcaatgtctcttctttcaaaataaagtgtgataagattgccgtaaaaaacggtgcaattgagattatcactccgatatttgaagccatcgaatatgttagtgcaatattttctaataaataatacaaagtaactccacaaagtcccgttagagcaaatgtcaactcttgcttcttcgtcgtttttcttagtcttttgggataaatcaaaattaaaataaataaacctatcaagaaacgaaaaaataatatttctatcggtttaaaatcagttaataaaattttagttgaaataaatgttgttccccaaataaaaattgttaataatgcagccaaatgtcctgaaaaatccttattcatcctctttccccttaaaaatattttgatactgtttcggtgtcaagccgattaagctcttaaaaaaacgagtaaaatgactttgatcactaaatcccgaaagcattgctgcctcaagtggactgagaccctgttcaagtagctctttggcatgattaacacgtattgtttcaagatattgatagggagttatcccaaaagaacgagcaaaattacgaattagagtatacttattcatctgtgctaattcacttaatgaatctaaagaaatttgattgataaaattatcatccaaatgcttttttactaatttgatcggctcactaaatcgactttttaatagcggctggttattagtatattctttaaccagctgttctatcaaaatataaaataattcttctttcaaaaactccgtttctttcttcatcacactttgatgcaatgtgcgtaaagattcgaccatctcactttgaaaagcaactggtttttcaaaatttggtaaatagctacatcctataacttcttttactgctcgcaccataacatctgcatcaatatttaaacaacgataatcaagcggttgaccatcgcgactttcacaagtgtgattatcacgaggatttaataacagcatatcccctggctccatatcatattcatccccacgacaagacaaatggcgattgcccttttcaacaaaaccaactacataacagtcatgaaaatgattagggaatttttgcattattccaacaaactgatatgcttcaatttgtaattgttcatcatatacgatcgttctagtttccaccacctgtatccctcctagaatgctactatatcacaagttttaaaatattgcttgaatgatattgacataaataaaaaagggagctagactccctgcatcaattcttgagtattttgttttaatgcttcaataaaaatttgacctaaatagctgcgcgctgtatcatttcgaacaatgtatccaatcttgatcgtttcatcaacagcaagcggaatcgcaataatatttttaccattcaattcttcgctaataatccctgttgaaatagtatacccatctaaaccaatcaatagattaaacaaagttgctcgatcactgactttgattattttttgatgtactaaagtgcttaaaatttcctcagaaaaataaaatgaattatattgtccttgttcaaaggataaataaggaaatggttcaatatcttcaagagtcacaatatctttttgagctaatggatttgtattactaacaaaaatatgtggtttagcaataaaaagctgattaaaaataagattgttttcttttaacaatttattaataactttttgattaaaatcatttatataaagaattccaatttcacttttaagagttttaacatcttcaattatttcatatgtgcgagtttccctaattgtaaattcatattcgttatcgctatatttttttactaaatcaacaaaagcattaacagcaaaagaataatgctgagttgaaatattaaagcgctttttagtactttttgtttctaaatatcgattttctaaaagttctgcttgttcaagaacctgacgcgcatatcctaaaaattccaatccttcatcacttattatgatacccttattagttcgtgagaaaatgataattttcatctctttctctaattctttaattgcattagataaactaggctgtgaaataaataattctttagctgcttcactaattgagcctttttgagctaccgtaatcacatagcgtaattgttgtaatgtcattttcttcacttcctttggccttattctaacactatttactcagttattgaagtttggcacgaatatttttagttgcttcgaccatattttttaaactagctaaagtttctggataagctcgggtctttaagccacaatctggattgatccataatttgctggcagacaatttttcaagcatcgaagttaaaactctttctaattcttcaacactaggaattcttggagaatgaatatcatagactcctggcccgatctcagttttaaaattaactctatttaaagtatcgatcaatgttagatcagaacgtgaagcttcaaaagaaataacatcactatccatatcttcaattgcttgaataatatcatcaaattcactgtaacacatatggctatgaatttgtgtatctgcttgaacactactatgaactaagcgatatgctggaattgcccaatcaagatattcactttgccaatccctttttcgtaatggcaatttttctctcagtgctgcttcatcaatttgaataattttaatgccatgattttcaagatctaaaacctcgtctttgattgcaagtgccagttgtaaagttgtttctgccaaagaaatatcaatccgcggaaatgaccagtttaacattgttactggaccggtcaacattcctttaacaggttttttagttagagcttgtgtatatactgcataatctactgttagcgggcgcactcgagaaatatcaccccaaataactggcggtttaacacaacgagtaccatatgattgtacccagccattctcagtaaataaatatccatctagattctcaccaaaatattcaaccatatcatttctttcaaattctccatgtactaaaacatctaagtctatttcttcttgatacttgatccattctttaatcatctgatgattaaattccgcatatgtctgttcatcaatgtcaccactacgataagctcggcgattagctcttacttctttggtttgaggaaatgaaccaattgttgtagttggtaaaattggtaatttaaatttttctttttgaatttggcgacgtacttcaaattctggtaggcgaataaagtcttcttttttcagtgctgcaattcgtgcttggactgcttcattagtacgattatttggctctttaaagaatgctaaattatcaacataataactatgtccttttccaattcgcataattacctttaattgaaataattcttttaatttttcttgtgcaaaagaaaaattatttttatatatttgctctaaattcctttcattttcaatcgtataagggacatgaatcaaggaacatgatgtatttaaaactattttattgacattattttttattttttcaattaaagaaactgttttttcatattcattcttccaaatatttttaccattaactactcctgcaaataagattttattttgatcaaaaccgtaacgatctaataaagttaaattttccttaccttcaataaaatctaatccaattccatcaaaatctaaatttaaaactgtttgataacagtcacgaatatctccaaaatatgtctgtaataaaatttttactgactctttattatctaaaattttagtatatatttctttaaacaagataatatctttatcacttaaatcaaaaactagtgctggttcatcaacctcaatccatgaagcacctaaatccctcaatttcttaataacctctaaatacccatttataagatcatcaagaatatcttgataagttagtgtccctgtaaaacgtaataatttcattaaagtatatggtccaacaatgactggtttggtcttaatccctaaatcaagtgcttcttgaaactcatcaaaaatcttagttccatttaagctaatttcaacttgatcatcaacttccggtactaaataatgataattagtattaaaccattttttcattgctaaagctttaacatctccattttccccttgatagcctcgtgccattgcaaaatattgatctaatgaattcaattgtaattcttgatatcgtttaggaatgatatttagtaaataggctgtatctaaaacattatcataaaatgaaaaatcgtttgaagaaatataatctattttttggttatcttgttcaacccaatgttcttttcttaaattttgggcaatttgtaataactcactttgttcaatctgtccctttaaataccgctctgtagcaaattttaattctcgatttgatccaattcttggatatccaataactgctgttttcattattttccccacacttcttcagcaatttctttgactaatgcaattttagcccactgctgatcttcagttaaattatttccttcttcagttgatgcaaagccacattgggtactcaagcataattgatctaaagctacaaactgactagcttcgttaattcttgcttttatcatttccttatcttccatttctgaaaattttgatgtaattaatcctaaaacaactacttgatctttaataaatctaagtggtgtaaaatcacctgaacgatcactatcatactctaagaaaaactcatctaccttacagttaccaaataattccttagcaactggttcatacccccctgatgaaaaccaagttgatctgaagttaccacgacaaatatgaattgttatattcatatcatctggcttattaacaatcgataagttaattaaatatacatattttttgaccagtgctcctacatcaatcccacaattagcatattcctcccgtttttcttttgaacaaaattctccccatgaagtatcatcaagctgtaaataccgacatcctcgatcataaaaagcctgaataatcctttgataagccatagctaaatctacaatcaattgttcatcatcctgatatcttgcaattggctgatattcttttgttctaacgcaggcaattaaatgtagcatcgttggtgctggaatcgtcatttttgctgttacaccattttcaatgattgaatttaaatattcgaaatgttctaaaaattcatgatcttcaaaatcaattttatcaataatttttaaagtcgccgccttgggctgaacccctttaaaatcaactgaccatttttcagcttcaatttttttaacacctgttaaacctgccaaaaaatcaagatgccaataactccgacgaaattcaccatcacttacagcttttaaaccagctgcctcttctttttttactaattttaaaatctcttcattttcaattttttttaattcatttttactaattaaattattattgaaattctcacgagcatgttttaaacgctcgcttcttaaaaaacttccaactatatcatatcgatacggtattttattcatgttatcacactccttgtgtacataggataacaaatctttttattattgaaaaatacttaaaacatagggttatatatagtttaaaactatatataaaaaagattagtttattcactaatcttaattgatatttcagtaaaatactcatcaatactattgattgcaaattcattgagacctctttcaaaagcatatcctattaatttcaagttttccttttttgcaaagtttaacatactacgatataatacagctattttatcccaatcccctttaacataaccacataaatattttcctttagattgtaataaaacgtttttgccatatcgtttgttttgaagggaaataaacagaccatcgtaatgttcaaaatcattatttttaattttatcaatactaatataactgccacaccctactttatattgttctatattccaagcctgctgcaaatattctaaaatttctttaacatcatattgaataaaaggctcatttgaaactaataaatattcatcttggcgctcaacgatttcgatttcaaaatcagtaactcgtgaactcttcaacaattgattcttttttatctctaataccttttttgtttgttttaaacgacgaatatcttgttctatttttagtattttatcatcagcaatatttacaaaatcattaacattaggattatttagataacttttaatttcgctgatactcatatctaactgctttagcattagaatattttctaattcaatactttgaaaataatcgtaatatcgataattattttcacctttaaattttggtttaaataaatcaatttcatcatagtaatgtagcgttcgcttattaattttatgtaatttagcaaattgtgcagtagttagttttaatgattcattttttaacattatgttcctccttgactttacagtaaccgtagactttatgataattatatattaaataaaggagaatagtatgaaaaatcaaattatttttagaccaattattaaaaaagactatttagcaattgaaaaaattattcgtgaagcatggcactatgatgagttttgtacttccaaaatagctaaattactatcaaaaattttcttaagcagctgtttaagcaatcaaacttttacgcttgttgccttgctaaaggaacagcctattggcattattatgggaaaaaatatcaaaacacataaatgtccctttaaatatagggttaaacaaggattcaatatttttaatctcttaataagaaaagagggacgaaaaacagctaaaatatttaaggctgtcaataatattgataaagttttgttacaacaaactaatcaagactatcaaggcgagctatctttctttgcaattgatgcacagtatcggggattaggtcttggaaaagaattatttaatctactgattagttatatgcaagaacaacaaatcaatagattttatttatacactgatacaagctgtaattatcatttctatgagcatctagggatgatgcgccgagttgaacaaactcactgttttaaaatcaacaatgaaaaaaacgtaatgcatttttttatttatgactacttgtgcaaaaaaacagtttctactgaaactgtttaatcgagtttatttagattttcttcatccaaagactttttaatcttataaatatattgccagcttcctaatcccataaagattaatccaaggactatatctctaactacaatagcaaagatttcactgaatgaaaggaagtaaggaatatatgaaaatgcagtaaaaatactttgtaattgcatcagatctttaatttttagccctaagctgattgattctgcaaaaaacagtaccaaaacgctacaaataattgaaattattaatccttttttagaaattttaccagccattcgctgataaccatttatcgctaaaaaaacaattaaataacctaagaatgcgacgataaaaccgatttgatacaccaatgcccaaagcacaccaccaattagagcaccagccacagcaccaatgattcctcggctactgtcctcaacgatttcttcagcttgggtactgattgcatctctacagtcatcacacatattcatcaattgaccatgatactcatagaatgaagttggtttattaatatgacaagttccacaacttggaaggaagcccagatctcttaactttaaagtaattcgatttaaaatctcatatacttcatgtaattcctcacttcgcaaagcacttaaggtaattgttccattactataattaatagttttaatgtttgttaatattgttcttaaattattaaaatattcatctagagcagttcgatcttccccaatagtatcgattgtaataattaggtcattgttagcactcccaaacatcactactactggataatcattaaacattccatatacattattacgtgtatcaagtttcaaattatttaataaagcaaactcttcaatatcattactacttacattattgttactgttaactacaccataaaattcattctcgttttctaaaaagaatttattaaatgttaatgtcatatatggcaataaccaaataaataatattcccagtgttactgtacttaataaaatccagccataaaaactaaaaaataagacaaaacatttcattttctttccttgcatcattttccagcttgttgtaattgcttcaaaaattgataaactaggataatttgctaaaagataaggtgtcattgataaccctaatcccaaaataattcctggaacaacaaatgccaatgttcctaaaacacaaataagtccaacacccagaacaccaaatccctgtttaaaatattgccctataggtgctctcaattcattaagatcagcaatatcctcctgcacaatttttttgatataacgatatatattgactgaaaaaccaattactaaaaaatataaagcaaatactcccactgtcacagctagatccataaaagtaaaagtatcataataactgcttcccccaatgtcgatcattactgaaaatagtaataaagcaataaaagaaagtcctagtgaagccgcaaatatagctaaaaaacctttccaaatattccatttattcgatcgtgttttttctttagcccataatttaattcctactctgtccatctttatcttctccctcttacaaatttactaatagcctatatattccggcaattttgtgtaccgattaataacacatgcacttatttgagctggtgttagaaatagactttttgataaatcactatttctaatatccatctttcttacatcacttcctaaaaaattaacaccacataaatcacaattagacaaatttgccccaattaaaaaggcccccttaaaatcttgtccacgtaaatctttttcatgtaaatcacaacccataaaatcagcacgattcagtactgtttttctagcttgcaatggtttaatttgaatatctttattcatttgacaatagacttcctgtaataaaggatttactaattgccgatacttatttaagtcaagtgcaaggatttcttcggcatctaaataagttaatgattcaatcatctgataatatgtttcgagctgttcatttaatcgttgactttgtacaaaatttttaccaacatataaataccataaaatttcatgcagctgtaccataacttcaaatacttcaaatagaagctggtcatcttctttgaacagggctgtcttttgtcccgctccaagacaatcgtagtttatacaaccataataatttacaatttctagctggtcatgtattttgcaacgataatctgctaataaatttttacaatttctttttgctggtttatcataaggaaaaccatcacttttaaaaaagaatagtgctcgacaacaaaatcctctacaaccacaacagtctgttttcaaaccagataacttattcataatatcctccaaaataaaagatgaagatcctatcttcaccttttattatacatgattattacaaactattcactaactctttttatatcactattatcaaaaatattacgattgattgctttattttgatgtgccacaattgttgtacaaacagcatcacctgtaatgttaactgctgttcgtgtcatatctaaaatacggtcaattcccatgatcatcccaatcgcttccactggcaacccaactgaattaaataccatcgttaaagtaactaatccaacacttggaattcccgctgtcccaattgaagctaatgtagctgttccaattacggttatgtaatctgttagatctagattgattccaaaggcttgtgccgcaaagacgactgccactccctgcatgattgccgtaccatccatattgatcgtagcccctaaaggaattgtaaatgaggaaattctctttgaaactcccatttttttagctaacgtatctattgataaagggatggtcgcatttgaagtggcagttgaaaaagcaaaagccataaccggaaaaaagtttttaataaatttaatcgggtttaatcccgtaaataatttgagtaagcctaaatatacaaataaacactgaaccgccaatgctatcaagacagcaatcatatacttacctaatggtaaaaaagcaccaaatcctattcccgcaaaagtccttgcaattaaacaaaatactcctaatggtgcaattgccataatcatcatagtcatctccatcataatatcattaaactgactgaaaaagttaccaaccacttcagcacgttcacctaacttagctaaaataacgccaactaataaagcaaaaacaataatttgaagcatattgccatttgataatgcactaattggattatctggaataatgtttaaaagtgtttcaacaagtgttgtagattctgttgtccctacatttgcagcagttgattgaacagctgacatatctaatccaagtccaggatttatcaaattaccaatcaataaagctactgtgattgctaacgctgttgtaaaaagataaaaaacaatcgttctaacgcctactgaaccaagtttttttgtatctccgattgccatgcttccacataccaaagaacaaaaaactaacggcactacaagcatcttcatcaatttaataaagccttgtccaatcacatataaaataccatcaataacaatatcatcccgaactgaaccagcgggtaagttaaatagtattattcctaaaattgcccccgctatcaaggcaataaatatttttgtagttaaaccaatttttttcttcgctttctttaatgccatcctaatcctccttgatttcttttatatattcttgtaacgactcttgccaagttggcatttgatacccattgactaaacgtaaaataaaattatctagtacgacatatgatggacgaaccacctcatcagccatctcttttgttgaaactggcgtaatcatcacatgactattaatttgtttactgatttctttagcaaactcataacgactacacacacctttacaagtaatatgatatgttccgtattcactagtttccattaaatatagaattgctcgagcaagatctttagcactagttggtgacccaaattgatcatttgcaacatttaaaaaatcttcttttttactttcagctataaactcattaacaaaatttgtaccattttgtccataaatccaattacttcgaataataaaatgtttatgcgtaaattctttaacatagtcttctcctgctttttttgaacagccatacactgttttcggtttcgccacatcaaactcgttatatggtgtatcacttttaccatcaaaaacatcatcagttgaaatttgaactactttagctccaatttttcgagctacaatacacaaatttcgtggtcctaaagcattgacccgaaaagcttgatcacgattcctttcacacttataaacatcggtaatcgcagcacaattaatgataatatccggtcgattgatttctccaaaactaatcacatcatctgtattagtaatatctaattcatcttgatctgtatttaaaacttctatttctaatggttcaattacttcattaattgctgttccgatttggccattggaaccaacaacccatacttttaacataattttcctcctcttttcataataaaagcgctgaatgtatcaacgctaatctttttttattatagcaatgaaattttatactgtcaaatttacctcatcttttaaaattgagtaaaagaaatcatcatgaacaatctcttgataaccggttacccccatacgaagacaaccttcatactgaaatcctagtttttctaacaaccttgcagaagcagtattttctttaaacactcgagcactaataatatcaatctcttgctcaaacaattttataataatagcttgcagagcttcatacatatagccattacgataatacctacagtctaaataatatgataaactgagagcatttacacgatatcttaaacgatcaggatttataaacacagcaccaataacattattagaattttttagttctatgcaatacatcatatcatgttccctctcaatatctctaatcatctcagcaaattcatatttcgtcatcgcattaaactttaacgttgccatatcattatgaatctttaaaagagtttgagcatcattattatcgggacttcttaaaatcaaccgttctgttattattgtttccattattttctcccttatccaaataactcattattatatactcatattgtaccacgacaaataaaaaaagatgataattaatcatcttataaccaatttccaaacaattcaaagccacaattaataaaattaaacttagcaacttttttattctttttataaactaataaaacagctaaagcattaagactttcttcaacataaccattcatctttcctgattgtggtgattttaattcaaaacgatgtcctgcttttattttcaaataaaatgtatgaggatgttgactaataattaaataatgatatccttcccgcgtaaacatatcttttactcttgctccataataagttgctactcgaatttgttgatcatctactaataagttcatgatcaatccttgaaaactacacgctaatagtggaatcttagcaattgataaaaataaacttgcctctttttctttacagctatttgattgtaaccataaataatcttgtggaaatgaacgtccccagtccttttcaatatagccatcaccaattatctgaaatttctgattatttacttttaagctcccagtaatatgatgtcgcagacttattattgcatgattacattctaaaaatggtaaataatgaaaaggtcccataatcgttggagcataacatgttgtttctagtttagtatactgactatttttcaagtttccttgaatatcaactagcccattatcaagatccaaaataatttgttctttagtaaaaaaattatttttaattctaatgtaaaagggatcttttccccactggaaatcatctaaactatattcaatcatctgactttggtttgtatatgtatccaaagtttgaataaatgcacaagatttttcaattgtcttactaatcccgacaataattgctaaagaaattttacaatcaacaattttgaaataccatccttcaaacaagcgctggtcactgtctttaagatgtaaattaagttctgtattttctattttcattttctcacctactagcaagtatatgaaaaagctgataatttatacattaccttctttaagatttttgaatctctaccttattttttaattgatatttgactttgagaatttggataatcaccattaataatgtcggcacaataatcaaacctattacacccataactttcattcctaaatacatcccaactaatgaaagaactggagttactccaagatttttagcaatcaattttggttccaaaatattttttgttattacaataatcatatagataacaagtaatgctcctgcaagatatattttatttgtcagagcactgattatgatccatggaatcatgatcatatctaatcctaaaaccggcataaaatcaaaaattgctattatgcaagccagcattatactatgattaatccctattattttaaatcctagccataattctccaaacgtaatgatcataattataaaataagctttaaataaattacttaatacttctttaattgtatctattataagtgccaccatttcatatcgtttaactaccagtctttcaattctagaataatctagaagaataaataatgaagtaataacaacaaatattaaatcaaataaaatacttggtattttcataataaaagcaattaaaccagtaataaagccagtagaaatactttcaactatgctcattgatccactgtaaataacatctaagtactttgttgcatcaattatataatggttttgactaaataactgatataaattttcaagataattaggcaataactctaataccgtgtatatttgaattacagcaaatataatcatggcaataattacaccaataaaaagaagataattaaatacaatcaaacattttgaaagaaaaatattttcaatctttaataatttaatttctttagctaatagcggctgcagtaccaaaacaatcaagcaactaaaaaaaagcggaatcagccagtttattaacacatatgtagctattacaatcataattattatcatcaaataataactatatttaattaatttttctttcatctaatcaccaatacagtatatgtttaaaacaaaaaagaattcctttaggaattctaattatttacactatggtgtacgacaaaagaactatcatctattcctttaaatacgtaacctttattttggtaatattgaattacaggcccaattgcttttaaagaattctcttttccattagcatcatgaaacaataacataatatttttctcagtcgatgctgtagcatttttaatcaattgttttactgataattgtcccgagccatcttcactatcctcattccaatcgtaatattgataaccgcgatttactacttctttagtcaatttactcataatcttatgacagtatttcttagaaacctgattactactgccaccaggaaaacgaatatatttaggcacacttccaatttgactatatacaagatcttcaattttttttaaatctgaaaaatatgctgatgacgagttatatatttgatcatattcatgaatataagtgtgtaatccaatcgtatgaccttggtcatgagctttttttattaaatcataataattttcattggttcctgttacaaaaaaagttgctttagcatcgtaaaccgctaaaatatctaaaaccttttgggtgttcatcgatggaccatcatcaaatgttaaatatactaccttctcatcactaggctcaaaacttcctattgtcttattttcaacaacgctaacaatacatgtttcttttgtcatattcccagaacgatctttagcaaaatatacaatttgataatcacctactttagaaatgtccaaattagaactatcaattgttaaagttggattatcatcttgattgtctttaacactgacacttgatagaagatcaatatcactatcttttaaaacacttaaattacgaattcctaatatttctggcggagtcgtatctttaggtaacacatgcacgactgtttttttggttacacagttactgttagcccgacatatcgatacttcaacttcgtaatcccctacatgatcaaattgataatcttttttgaatttaactgttgtccgagaattatcataaatatcttttactacatcccgagcagttatcttcattccaagatcaacagtaacttcctgtacttcaacatttggctttaaagtatcctgaagttcaatcgtaatcgtagttttgatgttattataaatatacgtaatcggatatttaccgactttactaaaatcaatcttactagtatctacattaacgtcactaattgagccgccaataactttttgaatattagcctgaggatcgaatttattagatatttcaatgacaggatgatagttgtataaaacgatttgattagttggtttaattgataatattatcaaggtaataactagaactaaaataattagaagtagtttatactttttcactttgatcccctcatcaaaccatattcacccttataaaaaaaagaactgctccgtgaggataaacaaaaaaatcttagtatcgtggtacatccctcgtcaagcagacacgggatgtaccatttatctaagatttattcttcttctaattgttttaattcatcttcaccagtaatatatttaagaattgccgtagctgcttcttgaggacctttatgttcgtttcctttaattcctaaacgtgttcttaattgtcctactttaaccccttgtttaaacattctattgaaataatcaactaaaataacttcagtttgttcttcacgttgtactggtccaaatggattagcaaaatagctgcctactaaaccgtattcagtagtagttcctttagccatacgatttcctgctctaaatacatctaaagcactatttacatcatcaaagaaacttaatgattcgccaccctcttcatagttatttgcatataggaagaagtcaacatcatgatgcgcaacaacatctttataatcagtgattggtattacgattcgcgcatttactttatctggattcataaaaacagaacggtctaattctttaaaactataccctgcatctaaatcatcaagtcgtacaaatgctccaatttctgtaccagaagttttaactttaccttcttcgtctaataatagaacacccatatcatcatatacagttactaaatcacggatataagctgctccaaatactttaatttgttcaattgtttctgatttaccagcgccactgtcacccataactactatatttttaacttcaccagaatgtaacgtaattttaaccatcgctccatggataggtaattgacgttgattgatcttacgaacattgtgtaaagttaacatcatttttttcatataaccaaagtaatcaaaatcatcacttgctgataataatgctaccatcatatcattttcatcatcttgatagaaactttgattcatcttaccatcttcataaccgtatacatagatgatatctggtttacgattacgatattcttcttcacttgctaattcaaataagttacataaagcaaccccttgagccataaatgctacattgaaatatacaaatgctaataaatctccaactttagctggataacagaaccattgttcagaatcaaatttcaaatcttcgattggattatgttttgtttctgggaataccccatcacgtttattccgcttagaataagtaatgaatggtggatgaataattacggtttcaataaatggaatatcatctaaattacgatattcataaggtaagaatgaacgcatatttgttactcttaaacctgcattaacccccgcagtaatttgacggtatacatgatgacgatatcccaaagctgtttcttcaatagtacggtatactgataaaactaattcttcaaacttagcttgagcatctccgaactgaacattttgatatcctctacttgtattttcattatatacaacactataacgttgtaattttctccagaaaagatatacttcctcaattacttttacaaattcatcacgatctctaaaatatcctgataaatgtggatatgaagataaaacttcttcaacagacatcactaataacaatttaaaaattgttcttaaatcactaacaatttccacactctcactttttacttctcttaaataagtataagtagtattttcttttctttttccttcgtgaacgaatccttttaaaactcgtgcaaaagattcactttcgattaattgacaacgagattggcaatattcttcagaaaagtttaagatcgcgttcccgcgagtaattttaaatttataactcattttaccaccctttctttcttcaacaagctacttcccccacttattgatttttgtcattttaacacaaaaggcacattgtatacaatacttattataaaaaaagttaattttctttctaaaataaaaaaggtcgttaagacctaattaatttaaaagaaaggaactgtaaagaaaactttgccaatcacatcttcatcaaaatcaaaataacctaatcgtcgtgaatcaagactattattacgattatcgcccataacaaaaactttaccttcagggatatcgatcgacatatcttcattattagtcataaccccattaatgtagtcttcttctagtaatttaccatttaaataaacttgattatctttaatatcaatatgatcgccaccaattccaattacacgtttaataatataagtttcctttttagcagcatcaacataatcaacaacaataatatcattacgttttggttctttatttttataaaataccttatcaactaaaacaatgttaccctcatgataagttggtatcatcgacgttccataaaccctagatatttgaacaaaatataatataccatatgtaactattaaagtaattacaataacctttaagtattccaataaaatactctttttgctttgtatagcctcttccattttatcacctgaagtcattataacactttttgttgttcaatcaagtaactatgttattttacgataatttaattttaaaaaaaagtaagtttagctattttgctaaaacttacttttaaataataattttattaagagaacggaaccgtaaagaaaaccttaccaactacatcttctttgaaatcaaaataacccaaacgccgcgaatcaagactattattacgattatcgcccataacaaaaactttaccttcaggaatattgatcgacatatcctcattattagccataaccccattgacatagttttcatcaagttttttgccatttagatatactatattatctttaatttcaacatgatctccgccaatagctataactcgtttgataatatgcttctctttttgatttgcatctttataatcaacaattacgatatcatttcgctgaggactactatttttatacaataccttgtctaccaaaacaatgtttccctctttaaatgtagggaccattgaagtcatttgaactcttgatatttgaataaaatacaatactccatatgtaatcactaaagtgagcacaattacttttaaatattctaataaaatactttttttactttgtgtagcctctttcatttttatcacctatgaacatcataacatttattactgttcatttaaatgactacgtaattttgcaataattttcttttctaatcttgatacttgaacttgggaaatatttaaacgctgagcgactcgctcttgattaaaatcaagctgataacgcatataaagaattaacttctctttttcatcaagtttatcaatttccatctctaatgcaattttttcaaaccacatcttattatgtttattttcaattcgttcctccattgaaatagaagaaccgtccttttcataaattggttcacttaatgaggttggataataagatgagtcaattgcctcaacaacatcttgaacatcaacatctaaataagctgcaatttgttcaactgttggatcttgaccggtttgattagttagtaattcacgagctttatttatttttaaattaagttcttttaaagagcgactcactttaattgtcccatcatctctaaaataacgtttgatttcacccatgatgattggtactgcatatgtagagaattgtaccccatagttagtatcaaagttattaacagctttcatcaaaccaatacatccaatttgaaaaagatcttctttatcataataattatttttgaaacgatggactattgaccaaactagtccaagattttgactgacaactaattctttagcacgatcatccccgcgatgtgcttgttcaatcagttcaatagtattacttttagccaaggttagagtctttcaattgtttcttaatagttagtttagttcctaaatccggtgttgaatgtatttctaaattatcgcaaagggcttctataatggttaaccccatccccgcatgttctaattcttttaatgaggtatacataggtatttttgcttcatcaatatcttcaattccttttccataatcttggataatgattttaatttgacgattgtcttctattgttactttaataattaccttacattcaggattattttgataaccatggataatggcattactaaccccttcactaatgattgtttttatttcaactaattcatcgattgtaggatttaatgaggtaataaatgatgcaacgctagttcgcgcaaagggctcattttcaattctagcgttaaaacttaactccatctggttcattatccttttacctcctctacatattccatcaaatcaaacattcctgataattcaaaaactttataagatgtttttgataaatttgctaaatataattggcgatcatctaatttcaattgattataacgtcctaaaactaatccaatgcctgaactatcaataaaattagtatgtaaaaaatcaaaatagacaggtccattgcccttatctaaaatactatttagtaagctgcgatatttaacaacattactgcagctaagttcgccataaaaatagacgataactttatcatctaatatcttgtattcaatcttattttccattatttcatctcctcgtttgtatcttacatcttttaaaataatgatgaaatggtttcgacaaaactagaagaaagcatacaaaaaaagtagtcataaacaaatttcataactactagatgtatttttatcaaacttggacatattaattagggaggcgataaaattgatgaaaaaattactaataaccctactggtagtatgcttactaccaatctctagagttcaagcattggacaatgatgttactcctaatgcaaagtctgcaatcttgattgaggcaaattcacggcaaattctctacgataaaaatgctgaagaaaagctttatcctgcttcaacaactaagatcatgacaatgattttaatgtttgaggccctacgaaataaaaaaatatcatttgatgatgaaattactacttcaaaatatgcagctagtatgggcggaagtcaagtttacttggaagttggtgaaagtttatctttaaaagatatgtttaaatcaattgctatcgctagtgctaatgatgctagtgtggcagtagctgaacatattgctggaagtattaataagtttgtagagatgatgaatgataaggctaaaaaattaggtttaaagaatactcattttaaaaatgcaaccggtctacatgatcccgatcactacacttgtgctcatgatttagcaataatggctgcctatctaattgaaatcggcggtgaagacttatttgctgtaacgtcattatatgatagttatattcgtgaagatacgaaacaaagcttttggctagtcaatactaataaattgttaaagttatataatggtgttgatggtctaaaaactggatatacaaaagaagctggttattgcttagttaccactgcacagcgtgatggtcaaagaattattggtgtcctaatgaaagaaacagctccaaaaacaagaaatgaagaaatgtgtagtttactggattatggttttaataattataagcaagttaccatttttaaaaaagatactttaattgaacagcatctagttgataaaatggataacctgactattgatgtcaaatgtaagaaagatatagtatatactaaagcaaaaagtgctgatgctaaagtttctactaaagtaaactataaagaaaatttcttaccggttaaacaaggtgatgttattggcacattagatgtcattgttgatggcaaaacaattgctacctatgatgtttatagtgacactaatgcttctaaatcaacatatctatcaaaaacaattaaaacattaaaatatttattttaaaacggattaaaatccgttttttatatacacaaaaacaggccttagcctatttcttaaaaatctcttaatttatctaaaccgtgatatgctttaggaatttttaatactgtacaatatttttcatctatacaaatttcatcatcatccatataagcaataaaactacgtttaacaatttccccgttaataacataataattaaaaaatgatttaactttttttatttttctaatgtaataatcactatatgtatattcatcgaaatttctcaatgatctaaaaaaacttgttttttgacgataaatcaatttacctgctttttctttgataaaagactgacttattttattaatttgatacaacatcattataactacaataattataaatataaatattcctcttattttgattgacgcaattaccaagatgcttaagccaaacaattctggaataatgaaataccgaagatactttattattgaaaatttgtataataaatctaatttagacatatcactccaattatccatattctttaccaatgacattgttatcactccttatttttattccattatatctttatcaaagaggattaaaagtcacttttagtaaagttgatattaagtttttatatgatttataatttaattattttagtattatacttataaatatatccataagttcaataataaaataatattccccactattttgatccctcctttcgtaaacaatgttttatttacattgtctactttagagggatcatatcattttttagtggggaatttcatataatagctatttatttaaactatgtatttttcttaaaataattaacaatagtaaggcactaattcctgccaatgctatcaaagtatttaaatctacgttatcaccggttggggttcccttatctacaggtttaacaggtagggcggttttagcgttgaccgttaaagtaccagtaacaatttctaaattataattattggccccttcgactttaccattgattacatattttcctgctttttcacctggttctctagttaactcaacagtaaatatatctccattaaccaatcctataatattataagtaaattctggatcaatttctccttcaaccttcattttatcatcgattattagctgcacttttttactagctatagtatatgtaccatccgtaaatgttacatcatagttttcattacttgcatcaccagtaatcttatattcacctacatcatttcccgattcacgttctaaagtgattcctaaatccgccaatgtatcaccataagctaaagtactatccactgctagtgaaaatgttaatactttttcatcatcaccatatgtcgtattaatgttatcaatattaatatttatagctttaggtgtaatattaatatttatagctttaggtgtaattgtatgctttccttttacaactactacttctttgtagtttttagctacatcttcattgataattgcctttattttatgattccctacattttcattgttatctgtaacacaaacaatcgatgatactaatgtatcaatatcgcgtgctactacaccctctaaagaatatgaatatttgtattcttcaccataattattatttatatcattaacagttacaattgctttatcagcctttttaataactaaagaagctactttcggtattgccgcataatgtgtatcatcaccactatatgacgctacaacacgatatcgaccagctgcagttggggggatagtactattataactattatcaacacctttatatactaatttagcatcaataaaagcgttacccgatttatcataaacttttccaactaatgattttgatgtaccatcatatgtttccacatttaaataattatcaaacttaatttgtactgtttcttttctaattgtatatacacgagtaattggttttactgcataattactccctaaagtatatactgtttcagtatatacacctggttctaaaattggttttgtattagtgtgatacttaccatcactagaaaaacctgtatatagtgttctaacttgaatcccatcaacaacagtaccttctttattgtacaatttaccaccaaaattgaaattgtatctatcactgtatactacgctgcctttaatctcttactttttccaaggagcgtcgctctttataattatcactgcccttttctgttcgatataatctagtcattcgataaatcaatcttgttatccctaaaaacatggtaatcaataaaaaatatataaaatagcaacttagcggtaaacttttatcggctatttcaaataaaaaaaacattagcaatactatcaattactgcagcgctaagaatatttttaagctcattaattgaagcaaattgccataaactacggtaaagtttaaaaagataaaaaatcaccaacgagataaaaatctccagtcccattaaattctttaatatattaaaataatagcttggaatttctccattaaacctaagaaatagcgctaaaaaacttgctagaataatgcaaattaaatcaattaaaattaaaataattcttcttacactaaactttctcattgcccctccttaataatagtaataattattgtatttatccttttcaacttctacttgacttaatactgttccaaggatattgacattattcttttgtaagatttcgattgaagccttagcatctttacgaccagttagttgtgatgagcaaacaaaaaccgttccatcaaccacattaccaatcggaatagcatcactaactaacataactggtggacaatcaataactataaaatcatacagcttcatcagctcattaataaactcttcaaagatatcactactaattaactcactaggatttggtaccttgatgccagcagttagtactgataactttccctcaaatgattcatcttcaataaattgaaaatattttgaactaatttttttagtttcaccatattcgatcaaagcgttagttaatcctcgtgagttcgatagttttaaataatgatgttgggtcggtcttcttaaatcagcatcaatcaataagacatttgcatatttcgttgcatatatcatcgctaagtttaaagccgtagtgctctttccttcattactaattgaagatgtgatattaattgctttaacattttttcctactgctgaatattcaatattagtcctaatgttacgatatacttcttgataatcaacatgattatttttgttacttttatcaataattttatgtgtactttttacggccttttttctctttcttcctaacattttctctctcctttgaaaactattcaccagtcatcatacagctttaataaattggcagttctaccagctgttaaacatatgaccagggaagtaaattagactatcacaaaataattttgatttattttacagagacaagatgtgttgtttctatattttctagtactattcatgaaaatctaattatatatatttatcactagaacaaataaactatcatacttggtattttaaacattcaactaatctgtgataataacataagccaaaaaatatcacagcaattcatactaagtattattttattttctagaactgccctaacaaaaaaaagctctgggcatcattgcctagagctttgctaatacatatcattttacatctatcaaatctagaatatatcgatatagatatattcattcaatcattcatctatatacaaatactagccgtattagcatattacaaattacttatagtaacgcgacatagcgacgattaccacgattaatcatttttaaatatttacagttttactaacttgaacttgttcattaacttgaacatgtgaatctttctttatttctggtgtctttcttctctttggagtaataccatattggtaagttggcacaagttccttaatcaatgaacgaatatcatctgtttctccatatgcagcttcttttaaatttattaatctttcaacaaatgtatcttcattcatctcaatcggttttccaatgtgaatcatatgattaggagtatcttgaagcccctcctcttccataagtaattcttcatataacttttctcctggtcttaatccagtatactcgatttttatatcaacatccggttcataaccagataatttaattaaattttttgccatatcagctattcttactggctcacccatatctaaaataaaaatttcaccacccttagcataggcacctgcttgaagaactaacgatactgcttcagggattgtcataaaataacgaattatatcaggatgggttactgttacaggtccaccttctttaatttgtcttttaaatattggaattaccgagccattcgaacctagaacattgccaaatcttacagcaacgtattcagtttgtgatcttttattgtaagtttgaacaatcatttcacataacctttttgtagcacccatcacattagttggattgactgctttatcagtcgaaatcaaaataaatttttgtgcattatatttatctgcagctcgagcaacatttaatgttccaaaaacattattttttattgcctcattcggcgaatcttccatcaaaggaacgtgtttatgtgcagccgcatgataaacaatatcaggatgataaatctcaaataatttattgaccttgacttcatttcttacagaagcaattaaagtctctaaattaagttctggataattatgctttaattctaattgaatatcataagcattattttcataaatatctacaattattaattgttttggtttatttgcagcaatttgacggcataattcactaccgattgatccgcccccacctgttaccataacaactttatcggttacatagcccataatatcagctaaattaacttttattggatcacgtcctaataaatcttgaatctcaacctcttttaaatcagaaatatgaacatcttcattaataaactgatatattccaggcaacttttttaacttacattttgtttctttacatatattaaagatatcgattaaatctcttttacttgctgaaggcatcgctaccataatttcttctatcttatatttatttacagcttcaatgatcttatcacgaccaccatatattgaaaccccatgaattgttcgattccatttacttggctcatcatcaataaaacaaataacttctttatagatactctttgaacctaaaatctccttataaactttttccccagcaactccggcaccaataatcattactttttctaaaggtcgttgctcttttcttccccttatattatgacgcgcggcatataacctaataaaacgataaataaatcgacttcccccaaccatcaatactaataataaaaagtaaataaaataacaacttcttggtaatggatttccagtcaattcacatattaagatatttgctatggcactcataatcgacgcaaatataatattttttagttcaattatcgatgcaaactgccataaactatgatatagacgaaaagtaataaagattgctagtccaattaatatcattgaaccaatcaatatatttactctatgtagatactgagactcaataggtccattgaatctcaataataaagatccatatgcagcaattataatgctaataacatcaaaactaactaaaaatattcgtctaatattcagttgcgtcttttctcccaatcttttcattctgttctatctcccttctagaaactcagaaaagtaactacttatcatttctcgattttctaaaatcatttaacattctatttttaagcatgataaaagattctatcaaatatacaaggcaattatgattaatttaagacaataaatcaagtgattttccatattttctctattttattacaattaccgacaatatccatcataaatttaatcttattttcattcttttttttaaatttataaaataacaactctgtcacacattctattttaacatttttctacaataaatattaatttttattggtaatttcttgcattttatccgcttataaaggataatacgttttggaatagttttattcaatatattaataatgggaggacttatggataaaaatgaattaaatgatgaagttgaaatcgacttatcacaattattgaaattactgaaaaagaatattcgcttgattattatcttagccttagtcggaataattattgcagcttctgcaactacctttctaataagtaaaaaataccagtcacaaggaagtgtattattaaaagctgatgtagttaatggatcattagactcaactcaagttaacacaaataaaatgatggtaaataactatgttaaattattacaaggtaataacattcaagatcaagttgctaaaaacttaaatattacttctgccgaagtacgcagttcattaagtattacaaatactactgatacacaaattattgaaatttcttcaacaactgttgatcctggactttctaaaagaatcgttgatgaaacaattagtgtttttacaactttaatccaagaaaagctagatgtgacaaatgttacgatcgttgatcagcctgaagtaaatcctaatccagtttcaccaagcatggttaaaaatgttattattggggcagtagccggtatcgttattagtttggggtatttattacttacatacctattagatactaaaattaaaaacggtgaacaagctgaacaatatctaggggtccctctattgggaatcgtccctttctttgaggaataaccatggcatttattgatatacatagtcattatgcttggaatgttgatgatggtatcgaaactcgagaagatgcacaggcagcattaaaaaaagctcaaattcaaaatattactaaaattgtagcaactcctcatcttactccaggaacaactacagcaaaagagtttgaacaaattaaagaacggattgaggaattaaaaaagcttgccaaagaatatcaaattgaaatctatccaggttgtgaagttatgcttaatggagactatctagaactattagataatcatcaatatttaactattaacaatggaccgtatttacttgttgaatttaatgttactcaaaaattacccgaagattatgatgatcgtctatatgaatatggaataaagcaaaaaattgttatcgctcatgtagaacgttattttcatcatagtattgatttaaatctaattcaagagtggattgatcgtggctatattattcaagttaacagcactagtttattaggaatccatggtagtatgattcaagaaaacgcataccagctattagataatggtatggttcatgtaatcgctaatgatgttcatcgccctaatggtaaacgtagtgttaatctccaagagacatatgaagttttagcaaaaaaatatcaagctgaggatttaactagactcatgtatgataaccctctagccattatcaatggacatgcgcctgaattaataaaagttcgtaaaatatctaaattaccttggtttaaaaggagaaaataaatgtttaaaaagaataaaaaacagagtgaaaaagacacatatctgattacttcgccagataaaaagcatgggaaaatcgattttaaagaagtataccgccacattagaacaaacatcgaatattctactgttggtaaaaatgttaaagcaatcaatgtgacatcttcaattcctagtgaatcaaaaagtactacatcattaaacttagcgatgatatatgcaacgaaatatgcaaatgtcttattgattgatgctgatttaagaaaagctacccagcatcgttatttaaaactatcgaactcacgaggattaactaacgctttgatcgaatatggtgaaactaaaaaaattagttcaaaatgtttccaattcattgaagatgaatcgtttgtaggaaaattatcagttttaacttctggggtcaaagtaccaaaccctagtgaattattaagtagtcaaatcttcgaagactttattaatgaattaaaaggattatacgattttattatcattgattgtcctccaattatgttagttagtgatgctattccgattggtaatgtggttgatggaacaatctttgtttgctcatcacaactaactggtcgtaaagatgctaaggcttcaatcgaaatcttacaaaagaataatgtcaatatccttggaacagtattaactcaagtagagcaagatggctctagcaatggatattactactattactaacaatgaaaaataaaaaaaacagtatttttcttattgttgttccaattctttgtattttaatagtagcattatttgcctatgatcgttaccaaaccaaccagttagcaaaaaaattcaagcaagataatcaaactgtcgatacttctaaaaacaataatcaaacatcgttagaaaacaaattaccaactatctattgcgttggtgatagtacaacgattggaactagcaaaaataccagttatcccaaatatttagaaaatagcattaatacaactattactacttttggagatgactctattaacagtcttgctttagcaattaaatttggcgttagtgaaatctatgttaataactttacgattcctgcaaaaagtgaagaaactacaattaccttattagataaaaatggccaggccgtaaatgctattttaacaagtaagaccaatattgataaatgtacaatcaataacattgaaggttccatcaattatgatacagctaataatcgtttagttttcaaacgttcaaaagctggtgaaagtagtaaaatcaatactttaactaaaatagaagtaacaaaacctgaaattaataaggataacatcttaatattatttactggttcttatgaagaaagtgttcaaggaagcttagctgaatatcaaaaacaaattattagtgcatttaacactgataaatatattgttgtatcattaactcaagatgatcgtgatgctacaaataatttattgaagacaacacatggtgatcattatttagattttaaaagttatttattaacaagcggtttaaaagatgcaggaattacagaaactgctcaagataaaacaaatctagctaataaaaatactccgtctagtcttttagatgacaagataaatggaaatagcaaatataatgaattattagcaaaacagcttactgataaaatgactaaattaggttatctaaaataaataaactagtttaacactttaatttttaataaaattaaagtgtttttttatagttaacagtaattaacttaaaaaaaatataaaagatattattatatcataaataaattgttttttatatatcaaatttttaatatttttttgtattttttatcattgtcacaaaattatctcaaatttaaataactaaatttaactaattacttgttattatgccaaaaaagatatattatatatgtgtatatttgtgtatctttcgcaaatattctaaaactaaaaaggaggggacaagatgaagaaacttttaagttctttaatggtagcttgcttaatgtttgttgcaactatctcaactgttggtgctgttggttctatcactgctgatgaacaaaaaatcatcgatgctttagaagctggtgttacagttgatggagttaaagttaatctaaaagctgctgatattaatgctgctaaaaattacttaactaacaatgatgttacagctgctcaagtgactactattttgaacaacattgaaggagctaaatcttatatgcaaactaatcatattaaagatatcgcttctatcaaaggtgctcatgccactgcaattttaggtttcgctcaagctgcagctgatgtacttgggttaactattaaagttggtgctgatggtactgtcactgtttacaaaggtagcgaagttgtttattcaactacaaacgttatcaaaaagactggttatgatttcactcaaactgctgtaatggcagctggacttgtagctgtattattcggtgcaggatattacgctaagagaaaacaacttttagttaaataatcgtgcgattaaaacataagcaaaaaaagataatggcactagtattagtgccattatcttttaccattatctgctacctagtattatttttaataattagtccaattattgaaccagtcatgtctatttacagtcttgttgctagtgaacatgcaccaaatttaaatgataacagcaacaaagatctatataaaaataaactagttagttctgctactattaaagcttcagaagtagtaatgccttcttatggtgacctatttggtaaaataaccattgattctgtcaacaagacaattaacctatactatggtgatggtaatgatcagcttcgtaaaggcgctggattattcaacggttcatttttaccaggatttaaccgtacttcattaattgccggtcactcattgccttactttgaatgtttaggtgatgtcaatgttggagatattattaaaatatctacccattatggtgattttgaatataaaataacagatactaaaattggtaaagctactgatgaatcaaattacgatcttgcccaaagcgagaaagaacaattgatcttatatacatgttatccattcgaattgattggttacaaagctgaccgtttatttgtttatgcagataaaataagtggtccaacgatcttggagggacaataacatggcaagaaaaaaatcaagtagtcgaactacattatcgtatattttatcattattaattgcaatctttctaagtatcttagtagttctaacagtaactcgttttactgttatgtctccaagtttcttaatttctaaaatggatggagctgatttttataaacaatcagttgtatcattaaatgaagagatccagcaagaaacacagtcaacaggatttcctatagaaatgtttgaaaactatgttgatgaagatactgctaaaacagcaatggaaaaatacattaataatgcctttgatggtggtgaaaccactattaacacaactgaatttgaaacaaaacttacccaggatatagataactatttaacaactaataatattattattaatagtgaatcacaagaagcaattagcgtactgaaaagtaacttgattgatttatacaaaagctatttatcattcccttatctagcccttgttattgatgttataaatacatatgatggaatctttttaattgcggcagcagctttagttgttttaatcggattagcaagtttcttattatatcgcctatatagtcattatcaaggtagaagacgctatttctcatatgccctatcggcttctggtttaatgtgtttcgctttaccattctttatctatattggtaaatttattgataaaatcagtttatcacctgcatatttctataatttctttacaagtaccttaaactcttacatgttgacatttgtaatcgttggtttagtaatgattgttttagcaaatattgtagcgtatataaaatttgaacgaaaataatgcgcttgtaattaatacaagcgttttattttgcttataaagaaaaaaggctctaacttaaattataggccttttaactgttatgtgtaattatcaaatatttgttcagcggtcttaattaaagcttttgaaaaagccagctcaaatacttcataatcaaatgaacttcgtgtaattcgattaaacagtcgataaaaatcatcatgattgctgataaaataaggaattcctgcatcaatacccaaatactcacaatacttaagataattattggtgtcaatgtttccacctttttcaaatcgatagacagtactcttactgattttcaacactttaacaatttctttttggggaatctgctttgtttttctaattctttttaacactttccctaatgtcaagataaacctcttttacattaccccaatttaaattaaacctaatcgctgcagacacttaaagattccatcatcatcaggctcttcaaatgtatcatccgcaattgcttttaacttatcaggagctaaatacgatactactccataagctgcctcgctaatcatttgaaaatcattcatactgtcaccaaaagcaatcgtatctttcatatctccacctagatatgcaactgctcgtttcattgcatcacctttagtacaattttttaaaataatttcaccattaataaaatcgtctgtttccttagaaaaaataacgatattaaaaaactcacttaaatactttacacagtcataaaatgccaacttatcttctgcaataaaacatacttttgttactttcgtttgcaaaatgttaaattcactgattggtaaacgtacttcttcatttctacgctcttctaaaaaacgtgctaattcaagatttccttcaagaatatttgcttgcttcttttcaaaaaaatcttggacacctggtgtttgatacagagcatctttagtttctaagctaaataaaattttagcattagtaaataaaagcattacttctgataaaacatactggttaataaaattctcaaagatgtatttaccatcaatactaacaaaaccaccggctgaagaaattattccgtcaaatccaatatcccgtatcgatttcattatcgacaccggagcacgtcccgtacataaaaatgttttatgaccatttgcccgtgctttctttattccttcttcagtattcttagttactcgtttacttggaccaattaaagttccatcaatgtcaaaaaataaatatttacccatctttatcctccgttatgactatattatacaaggatttcatcaattagtatcggtttttcaacaaaaaaatcaacaattttataagctccatataattcgttaattaattcatcgcttacttcattatttgcatggatataagctaatacttctcccaccttacattgatctccaacttttttatttaagataatccctacgctatggtcaataacatcatccttagtctgacgaccaccgcctaatttcattgaaactattcctaatgttttagcttcaagagtttgaatatacccagcttgcttagctttaacctcaataattagtttagctttagtaaacaactcaggattaccaatatactcatcatttccatgttgatatttaaccatttctttaaatttatctaatgcttgaccagtatcaattacccgcttaagcatttttaaagcggactcttcatttttgcattttttggcctgtactaacatatgactgccagcttcaagacaaagatttaaaagatcctcaggaccacttccatttaatgtatcaatcgcctcaattacctctaaagaattcccgattgcttttcctagcggttgattcatgtttgaaatagctgctcgagtatctttacctagatgttgtccaatttcaatcattgtttgtgccaagcgcttagcttcctctttagtttgcataaaagcaccttccccatattttacatctaataaaatagtatcgctgccagacgctaatttttttgacatgatcgatgaagcaatcaaagggatacaatcaacagttgcagttacatcacgcagtgcatacattttttgatcagccggtactagtgtagcactttgtccaataatcgcgataccgatttcattaacttgtttaataaaatcatctttacttatttgaatttgcaaacccggaatcgactctaatttatctaatgttccccctgtatgacctaaaccacgccccgacatcttagcaactttaaccccacaagctgcaaccattggtcctaaaactaaagatgttttatctccaacaccacctgttgaatgtttatcaacctttacacctgcaatttcacttagatcaattatttccccactatgaagcatttcatcagttaagatagccgtttcatgtttagacagcccattaaaacatattgccattaaaaaagcactcatctgataatctggaatattgccatcattatatcctttaataataaaatggatttgttcttttgttaactcatgattatttttctttaattcaattaaatcaaccattctcatatttacacaacctccgtagttatattgtactacaaacaaaacaaaatattaatctaaacaataataaataaaagacttagaattactctaaatcttctaaaacaacagctgttcccattaaaaccggtttatttgaatcacgcaaatcaaagcaaacccccaatacagcattggcacctaatttttcagcagctttagctaaattttcttgagctttgacaatatattcttccactcccattgttactcgaaaagctcgtatagcatcatcatagccgactactatgcctaagtctttaactacttttttattaggataactgcttaaagttgaaataatcatttctatttcctcctttgtatcttctctaattatatcttttaatttataaaaaaagcaaccattaggctgcttattcgaatttactatcaacttcaaaaatattatttccattcaaataatctttaactaacattcgcttctttccagctagctgtaattctgtaattaaatatattccttcaccagttttaaccccaattgcatctttaaagatcttaacgattgttccattttcttgatgagcgtggtgcttaagggcattttcacatacatgaattttaccggcccagatctttacaactttaccttgataagtggtataagcacctggccatggattcattccacgtacttgattatatactcgaagagcactcttactaaaatctattttttcttgttcatgactaattgttggtgaatatgtaactaaactttcatcttgggcaattgactcatttgtaccagcaagtacgctcggtaaggtttctagtaacaactctgctccagcaatactcaaacgctcatataattctcccgttgtttcctctgctccaattggcacttcgacttgagaaataatatttccagcatccatttttttgaccatatacatgatcgttacccctgtaacttcttcaccctccatgattgcataatgtactggcgcgccaccacgatatttaggtaataatgaagcatgaacattgatacaacctattttaggagcatttaaaactgcttctggaacaatttgtccataagctgcagtaataattaaatccggctctaaggctatgatttcctgatattcttccttaatttttaaaggctgataaactggtatcccagaagccaaagcaacttctttaacttcaggcattgttaacacctttttacgaccaacaaaacgatcgggctgagttactacagcaacaacattataattattttccaacaatttttctaaaacctgtttagaaaaacttgctgttcccataaatattatttttgcatctttcataatatacaccatcactttcttactataaaagtgtactaataatattggaaataatcaatactaatgtttcaataactttaatacaaacttcactaatctgtttaactactaatgataatgtattttcttcattatcattagtagttccataatcggtagtaattggtttttgttctttaacatcctcttcaaactgagtaatattcttgtcaaatacagctttttggattccgtagtctccaaataaaccattaatcataaataacaataatccaactaaacaaagatcaattaaaaaatttttcatcctaaatattctccaatcgctttagcaataatttctactgtcgcttgaacttcttctttagtattactttgagcgccaacctctattagaaccatattgtcactaattccttgattatagtgagattttttcacataaacaccacggctgatttttggaactgttgcattagctaaatctgacagtttttgtgaaagctgattaaccgcatcaaatttaccactgcttttacctacaacaaacatgattttagcatatgattttccatcatggctaatggttgacagctctttagaaatcgaatcgcgatgaaaatcaataattaagtcataaccaccactaagctttaaactctcttcaagatacattttagataccgtatatgatttattataagctattttatgaaccgctttatagccttcaaaatcatttccttcaacatcgcactggtatcctttattatttaaacaatcttttaaataattagctccttctacgacattaaaaccatcatattcttcaccctggtgagtattataaatatgaatctttttatctttcgtgggaacaaaactagtgttggttggattggttgccactggagtagttggattattttgttcattattaattgcattaataacttgggcatttgatccgcttactttagttggaagataaacaattaaacctacaataaccgccaatttcaataaaattaaaaacgtatttttaagtctcatctgcatcacctactatactatacaatacaatagtatgcatgaattgtaggatttagtaccttaacgcattaatacttttacttattatttttgacataatttcacactgttcatcaatttgcttatcacttaatacaaaattacaatcaatcggattcaatatttcattaaataacagctctaattcactatcatccaattttcctaattgtcctaacatcatttctttttgctgttcatttaagctcccatgataacgttcacgctttcctacttttaatttacttattggatttaaactatcaccaaagtaatttagcgtataatttaagacatcacttactaaactgcttgcataaataacagttggtataccaattgcaattaccttagcacccacagtctcctcgttgattgcctgacgataattacctatcccactaccaggatttatccctacatcgttaatttggattacatgagctaatttatgataatttttagcacagagggcatctacaacgattacaagatcaatatcctctttatccactaacgcttttacaatcgctccagtttccatccctgtttgcaccatcaccccaggagcaatacctaaaatatcataatagtgattaattaatttgtcttcatcatcaagaaaatgagtaatccgcacatcccttaaagttcgtgggccaatcgcatcattagttaaatattgattacctaaccctaccatcaaaatcttaggataatcaatcttatcaattaatggctttaaattatttacaacttccttaataatagcagtttgttccaaatagtctttaaaacttatttcgatataagttccaatcccctgattaatactttgatgagcctgaaggatcgaaactttttcaaccttaacaccatcattaacatactcttccttttgataatgcttaccaacttctagttgctctagcgattcggttgctaaatcactacgtatattactaaaattcatcctatcacctattataaatatcaccaattatggaaatttaatacatatttgtccaataatatcgtatcaattcaaaaaaaagttgcatttattggattatttttatataatgtaaaagcaagaaatgaagcgaggtgaaagatcatggcaaatatgaaacaacaaattaaacggtataaaaatgataaccaaaaaagagcaaaaaatacttcatataaatcagcattaaaaactgcaatcaaaaaagtattagctgaagttgaagctggaaataaagatgaagcagtaaaagcttataacgaagtagcttctaaattagatgcttctgtagttaaaggaattcatcatagaaactatgctagcagacaaaaatctagattagctaaattagtaaactctatctaatgatagggtttttattttaaaggagaaaattgtatggagagaaaagatattgatattaaagatacatgggacttaagtactatctataatagccatgaagctttctatcaggatttagaaaaaactaaatctttaattaatgatctaattactttcaaaggtaaaatttgtaatagtattgatagcttttataattttttaacaacaaaagatacggttgaacgattaatgaataaattatattgctatgctcatttaaattgtgatgtcgaaccaaaaaatcaggaatatcaaactatgatggccactataatgggagttttagaagcttcgtcagtacaaatatcatttgtcgataatgaaatcattgaggctaaagataaagtactggaatatttaaaagatccaaaattagaaaaatatacttacaagattaattcattattatcatatgaagcacatattctgcccaaagaacaagaagaattattagctaaagtggaaagtattgctgatacttctagtcaagtattcaatgctcttcgtcttgaatatgaagatgttgaagaagatggaaagttgaaaacattaaataatgctactttaaaccaattcctaaagaataaagatgaaaaagtacgtaaacaagcatatactaatttctttaaagagtatcagcgctatgaaaatgtctttgctcaaacattggccggggtaatgaaaaaggatgctttttatgccgatgtacgtaaattcaatagtgctcttgaagctagcgtttttgatgatgatgttcctagtgaattattttttaaagttttagaaagtgcaaacgtcaaatatcgacacttatttcatcgctataaccgactaaaaaaagagcttctaaagaaagatgttatttataattatgatttaaatattccactagtatcttcaatcaacaaaaagtatacgattgatcagtgttttgaaattattaatgaatgtcttagaccatttggtcaagattatttggacattattaataaagctcgaaatgaacgctggattgattattatcctacaccaggtaaacgaattggtgcttattctagtggcagttatgacactaatccttttatcttaatgaattttattggtgactataattctctttctactatgatccatgaacttggtcatagtgttcatagttatttatctaatcatcatcaagatgcagttaacgctaattatcgtatttttgttgctgaagttgcttcaactgttaatgaaacgttactgattaattatatgatcaaaaatgctaaaaatgatcaagaaaaagcatactttatttatgaacaattagaaaactgtgttggtttgatttttagacagccaatgtttgctgattttgaatataaattgcacacgatggcagaaaataatgaaccattatcatcaaaagttattactgatctatatgcacgacttaaccaagaatattatggaaaagatgtaactatggatgaactagttggctggtcatgttattatgtaccacatttctattatgattattatgtatataaatatacgttaggtatgaccgttgccttagccatagttaatcgtattttaaaaggtaatcagcagcaagtaactgactacttaaatttcttgaaatctggaggcagcaaagcacctgttgagcttttaaaacaagcgggtgttgatcctttagatgatcaaatttatgaagatgcatttaaatattttgaagaactattaaatcaatttgaaacaattaaaaaaaatgcttagagaatcaattatgattctttaagcatttttacttttttgcttctttctttttcggaagcaccaaacttaataacaaagatacaacaaatacacctgcaacagcattaccattaaatatatctcccactactggtggaaaagctgcaaaaaaattacccgaagtttgagttaatcctaccccaatacaaaaagctaatgaaacaatgatcattgtgcgctcatcaaactcattttctttaagcattttgattccttcatacatgattgaaccaaacatcatcactgtacatccacctaaaactgcttgtggtaaggaattaaagaatgctcctaacggtggaaatagagatgctaaaattaaaatcaatgcccctactaaaatggtaaaacgattaataacttttgtcatcgtaactaatcccacattttggctgaaagatgttaaaggaatacaaccaaaacaccctgaaattgcgctagaaaggccatcaacagcaagtgaaccttgtagttcctccatcttaatatcacgttctaaagcaccggtacacactgctgtagtcgctcccgttgtttctgcagcagataccaaaaatacgattgcaatagtgaagaatgctcctaaatcaaaaactggtgtatgactcgtaaaaaaaactaacttgggaatactaaaaaaacctacttcttgtattgtttttgttattcctgaaaaatccaccatcggagcaatatttgcgaccgtaaaaataacagatagtaaatatccaaaaataagtcccactaaaatatttaaatttttataaacacctttcagtaaataacgtgatactaaacagacaactaaagtgaatgtaccaactaataaatgataccatgacccaaaatcagcagcaccatttccaccgccccatgaatccattccaactgataaaagtgaaagtccaattgcaattactacacaagctgatacaactggagttaaaaaacgtttccagtattttgcactcaatccgacaattccctcaaagatcccacctaagatgaccgctccgatcatcccttcatatcctaagtctgggttcgtacaaattactaataaacttcctaaaaaagtgaaactaacacccataacaataggtaatttcgaaccaatcttccaaactggataaagttgcatgcaggttccaatcccagctacaaacattgcacattgcagcaattgcgtgatctcagctgaagttaaatgttctcctgttcctcttacaagtgctgcaccacatacaatcaatacaggtgctaaattcgaaacaaacatcgctaaaacatgctgcaacccaaaaggaattgctttttttaaaggaactcttccatttagcttgtaaatattttctgtacttacagatgtaaccttttcttctttactattttccatcataatgacccctattttcttttatcttcttgaagttataactgctatctatccaaacaataataactataaaaaacgatagaattttaccataaaaatagacaaatatctactccctagtaagccttttctttaataaagccatatatataatagaacatttatttttattaataaggaaggatatgttataattctaacgaggtgaaattcatgaagagaaatgaaacaagaactatcaaagtgggaaaccttactattggtggtaataacgaagtaattatccagtcaatgacaaatactaaaactaaaaacattgaagcaactgtgaaacaaataaatgctctagctgcaactggctgtcaattagtgcgacttgcagttttaaataatgatgacgctctagctattaaagaaataaaaaaacatgttagtattccgctagtcgctgatattcattttgattatcgtttagcattacaggcaattgaatcaggaattgataaaattagaatcaaccctggtaatatcggttctccagaaaaggttgaaatggttgtaaatgcctgtaagaaacatcacgttccaattcgaatcggagtcaatagtggttctttagaaaaagatattttagctaaatatggcaaacctactgctgagggaatgattgaaagtgcgaaaaagcatgttgaaatattagaaagcctaggtttctatgatatctgtatttctttaaaatcatcaaacaccttacttacgattgctgcatatcgactagcaagtgaaacttttgattaccctttacatattggtgttacagaagccggtacaaagcttggtggaacaattaaatctagtttagggattggcacgattctatatcaaggaattggtaatacaattcgagtttctttaagcgatagtcccttagaagaaatcaaagtagcaaaaatacttttgaaagaattagagctaattgataatgtcccaactcttgtttcttgtccaacctgtggaagaattcagtatgatctgattcccgtagcccaagaaattgaagattttttaaataccatcaacgctaatattaccgtagctattatgggttgtgctgtaaatggtcccggtgaagctaaacatgctgatatcggaatcgctggtggttttaaagaaggtcttctgatcaaaaaaggtgagatcattcgcaaggtaaaacaagaagatatggttgaagaattaaaaaaagaaattttattaatgattaagtagtacattttagtactacttttttactttatgcatataattgaaaaaaaggaggaaacatgatgagtaacactagttacaatgaattatttaatttagattttaagatgtttaagaagcttgtatatgagcaggatattgatattgacgaagagcaattattactaatttataatttaattcaaaataatcgctatgcactgatcgatagccattataatgaagttctctacaattatataagtgaaaagacaagtatctctacttgccttaaaattaaaagttttttatccaattgtccccattactttaatctaggattaaaagtttgagttctaaacatctcaatttcttccttatatggagcaattttttcaatatatggtgtttctaaaatcttaggaacactttttaatttatcatgatgaacgatcatattcaatgtatcaaatccaatatgaccatatccaatattttcatgacgatctttacttgctccacactcatttttagaatcatttacatgaacaaccaataaccgttccaaaccaattttttgatcaaattctgttaaaatatcatcaaacttagttaaatcaaatccagcatcatgaagatgacaagtatccatgcagacccctaaacattcattattatcaacattttcaataatatattgcaattcatcgaaagttcgaccacattcacttcctttaccagccattgtctctaaagcaattttaacattaccacaatcttttgttgcttcattcaatccttcaacgattctttccaaaccaatctgactcccagctcctacatgggcacctggatgtaaaactaatcgtgttgctcctatcgctttacaacgttctatttcttgctttaaaaagctgactgctaattcaaaagtctcaggttttgttgtattagctagattgataatatacggtgcatgcacaacaacattatcaatttcaattccattttctttcattaattcttttgcttcttcaatgcgtaattgatcaataggcttacgggcagtattctggggagctccagtgtaaaacatgaaagtattagccccgtatgataatgcctctttgactgaacctaataacatctcttttcctgacattgaaacatgactaccaataatcattaattctcttctccattcctcttagccgcttgagctgcacgagctctttctttcttttgtcggcgaatatcattttgaatcattgctcgtttttgtttacgaacaacttgctcaacttctcttttacgtttctttttataaccaggttttaccttttttggtttacgaataatactttgaactttcttttctaattcggtttgttgtttaggacgtttatttctttttaaacgatcacccaaatcaacaaattgaccatttttaatcgtcatatttttaaaaagaattcctttacgttcaagaacttttaaatttgcttcatcggttgtatcatacatgctgtaacatattccagtataatttccacggccgcaacgaccactacgatgaatataaaaatccggttctttaggaaattccatattaataacatgcgatactccatcaatatcaattccacgagccgcaatatccgttgcaacaataaattgatattcattgttttgaattcgccgcatcatttgcttacgttcacgaggttctagatcaccatgaatctctcccactttaaatccgtcttctcgtaattttttagtcgtactggcaacatcactacgagtattagcaaaaataatacatacataaggatcaatcgactcaataatcttttttaatacctcataacggtttttatgcttagttgcaattagaatatgttccacattttcagtagttactttatcatcatcaatctctactaatactggtgatttcatatatttttttaaaaacggtcttaacatctgcggaatcgttgcagaaaagaccatcattcttaaatcgtcacgcatcttcccggctacagcatcaatatcttccaaatatccaaattcaagcgtcatatcagcttcatcaacaataaaagttgaagcagttgtaacttttaaagcttgttcatctaaagataaatctttaattcttcccggtgtcccaataacaacatgtggttgaactgctagtttattaacggtcttttgacgatcatttcctccaacgatcaaagatactttgatctcactattatatttagtaaataatttagcattgttatagatttgggttgctaattcccgtgtcggggctgtaattacagcttgaacactattattcttaggatcgatgcgatccattaccggtaacaaaaaggcatgagtttttcctgtacctgtttgtgaaataccaataatatcactatttttatacactaaaggaattacttgttcttgaattggagttggtttttgaaaacctaattcttcaattgtttgtaaacaaaattcctgcattttaaattttgtaaatgtactcattttgtactcctttctttgataaattcaactaattttaacataaccaaaataaaaagcaaataaaataaacctattctttaaatagatttagtatgttctattctaagtcctcaaagttagttttaaagacctaaatcccacttaaaaacaaataaaatagttaaacaacaatagtttacccaaacaatttttatctagctattgccctttgcaaaaataacctctaactccaagcaaaataacaagtattcaatatcacaattattaattatttgcatacattattaataaaggagggataaaaatgaacccattctatgatgaaaatttttactacaataatttcaatccccaaatgaatcccatgaatcaagggtttcctgttaatagaaaactaaaaacccgcgccaatttacaaaaaacattacattatgcctctaaaactgtttataccattaatcaagtaattcctctagtctatcaaatccgccctattatcaacaatactaaaaatgcttttagagtcattcaagcagttaatcatattaacgatattgactttgatgaggttgaacaaaatattactcctatcgatcaagagaaaaaagaaacaaaagaagaatcagatgacgtaaagtttgaaaatatggtacaataaccacgaggtgatttaatgaaagtatatccaattacacccagaggatattgtaaaggggttgttcgtgcaatcgaattagctaaaaaacaagcccatcaagatgatgtttatattctaggcatgattgtccataaccaatatattgttgatgctttaaataatttaggtgtcaaaacgattgataaaaaaggtgcttcgcgtgaagaattattagatcaggtttcccagggaacggttatcattactgctcatggagctagtcataatgttataaaaaaggctcattcaaaaaatattcaagtaatcaatgctacttgccccgatgttattaagactcatgacttaattaaaaattatttaaatcaagggattgaaattctttatattggcaaagctggtcatccggaatcagagggagcattatcaattgatcctgctcatatccatctgattgaaaataaaaccgattttgaaaatcttgatcctaatttaaactatgtcattacaaatcaaacgacaatgtctttatatgatgtttatgatttatgtgaatatgctaaaacaaaactaaataatttaattgttgctaaagaaacatgtcaagcaacaactgtacgtcaagaagctattgcaaaaattaatgatgaagttgatgtcatttttatcgttggtgatcctcattcgaacaatactaaaaaattagctagtatcgcacatgaaaaagctaataaggacacttatatgattgaaagtgttaatgatattgatatatctatgttaaaggaaaaacatgctgcagctgttagctcaggggcatctacaccaacatacttgacaaatcaagtaattgaatatttacgtcaatttgattatcagaatgtttctactcatcctaaacctaaaattgatttagctaaaattatttaaaaagcttaattttctctcgaaaattaagcttttattcatctggcagccaattaactcttcgataataaattaacaatccaattgcacaaattgcccaagtaacaggccatcctgcaaaaacaaaagctagattatgcgttaatggaacggtaatcattaaatagatttgtcttaaaataacaaaacttcctaccataaaatacattggtactttagaaagccctgctccacgcaatgcaccgttaagaatttgaacaatcggtaaaataatatagcatggtgcaaaaacattgatcattgtcacccctgcagcaattacggctttatcattagtgaagattccaactaactcactaccaaataatcccattgtaatcgaaccagctaagattacaattgaacacattaaccaggctgcttttactccttgacggacacgttgatattgttttgcccccatattttgacccacaaaagttgtgattgccatattaaaactttgcaacggtaattgcaaaaatccatcaattctgatcgttgatgaatatccagccattgctgcagttccaaaactgttaatatacgattgtactataacatttgaaaaagatgttaaactttgctgaaatgctgcaggaaagcctacttgtacgatttttctaacaatatgtttgtcaaatgaaatctcagtaatttgcactcgataatcttcttttgtgtgaatcaactggtacattaccattaccgcactaattgcctgagcaattactgttgcgattccaactccagcaattccccaattaaaactacaaacaaataaaaaatctaaagcgatgttaacaacactggcaacgatcaaataaattaaaggtcgttttgaatcaccgattgctcttaaaattcctgaacccatattataaacaaggccaaaagaaataccacaaaaataaatcatcaaatacatcgatgaatgaggtaaaacttcttgtggtactccaatggcctttaaaagcggttgggtacacaatagccctacaaccgtaaaaacaacacataaaactcctgtaagagccagtgatgaatggacagcacgctgcattttttcaatccgtcgtgccccaaaatattgggaaattacaactccagcccccgttgccagtcccataaaaaagcctacaagcatattaattactggggtagaagctcctacagcagctaatgcattactgttaacatagttgccaactacataagaatcgactgtgttgtataattgctgaaataaattaccgatcaataatggaattgaaaaccataaaattgatttataaatactccccttaattaaatccgtactttgatctgccataaatctccctcgctttaacatgaaaatgatacaccttattaaccagcattacaagaattgcttaaacaattcttgttcaaaatatgaaaatcaattatatctaaatatcacgatgttataatttatacaaggagaaattatatggaaaaaaagattatattttttgatgttgatggcacactcgtaagtgataccggcgggattgaacatgtacctgaatctgccaaaagagcaattgctttaactagagctaaaggaaatttagtatacttatgtactgggcgcagcaaggctgaaatctatgatttcattcttgaatgtggaattgacggagtaattggagctggcggtggctatattgaaataggaaatcaaatgctctatcataaaaaagtgacaaataaagcagttaatcatatggttgactattttgatactaataattttgattactatgttgaaagtaatggcggtttatttgcaagcaaaaatctagttaaaagacttgaaagaattatatatggtgattatgaaaatgatcctcaggccaaagctcgctatgaaaaaaaagacagccattttattaacgctctaattgaaggtcaagagatgcgtcgtgatgacattaataaagcctgctttttagaaaatccgaatattccatttaataatattattaaagaatttgatcgagaattcaatgtaatccattgtactgttcctgcttttggtgataacagtggcgaattatcagtcccaaacatccacaaagctaatgctattgaaacattgatcaactacctaggaattgaacgtaaaaatacttatgcatttggtgatggaatgaatgacaaagaaatgcttgaatatgttaatattggaatcgccgtcggcaatgctaaagaagggttaaaagcagttgctgatgaaataactgacaatatagataataacggtatttacaattctatgaaaaagcataatttgatttaaacatataattgaaatataatattattaattaagactgtattgccgtaaaggaatcgaatcattgggttcctttctttttttatagttgattgatttttagaacataaaactatttttattaaataaaataagagtaaaatttgaacatattgtacaaatttctaattcatataatcgatatcatcacttaagtgcctaactaggttccctaagaccatatcctaataaaattatcctcaatatcaatattttaaacagttattttaatacaactaaaaacacacatcccattatatgcttacatcaatagctccaattatgttatagcataaaagtcaaaaaccaagatacctactttatgtaaatatcttggctataattacttacattcaactttatgacatgcatcaaaatactttttaataatatgaataataatcctgactattcgcttcttttacagtaatcccaagattactcaataaactagcaagtcgcttttccataattacttcaagatgatgaggaacatcgattaagacaatatcatgatccaatgcatatttagcatgacgatgtttactatcacccgttatatatgcatccactcgaccagctagctgttcaagatcatcggccccactaccaccacaaatagcaattgttttaatctctacttctttaccagcaagacgtactggtacattaaaagtatctttaactttcttaactaactcgctagtcatacaaggctgatttaaaagtgccattttccccacttgaaattcatcataacagctaacatcatgaacacctaaagcattaataagccaatcattcatcgaaataccatctttgcctcgatcaagacaagtatgtaggctataaacaagaatattgttttttattgccatttcaataaactttccatgatgattatggaaatcaagattcattatttcttctagcaaaaatggatggtgtgtaactaacatttgacaattttgatcaattgccttttgaagactttctatatcagcatttaatgcaaccattatacttgttacttgttgattacagtcacctacttgaattccacatttatcccacgacatttgtaagttaagtggaaagattgattccaaataattaattattttaacggcattcatggagcacctcttcaatcattttcattttatcagcaatttcatgataacgcggatgatcatgtggtaatgtattttgaatcttttcataaacttgatactgtttttgccatttttctttaaacaatggagtttgattgttgattaaaattggtccaaactcttcatccttacgattatatgtaattgctttattctgtctcgctgtaactaccatcacctcatatatatgcccagcatccttaaccatctgttcatcaatgatgatccaatcattagcaaataaatatttacgtaaatgatcattattggcattagcttgtaaaaacatcagtttaacatttcttaaatactcacgatgctcttcaagaatctcactaattaaataagatcccattccagcaatactgatcatatccacttcacgatcaagaattgggttcagtccatttcccaatagtgcaaaaactttatcttctaatccatattgtttgattgtctcttttgcggaatctaatggtccctgtgctacatcacaagagtaagcacaagttataatcttatttttaactaagtagcatggcaaatagccatgatcacttccaatatctgctaaaacacttccttgtttatatttactaattacatcagcaattagctgtaatctttttgatagtttcattttaacgatctaagaagtcttttaatctttttgaacgtgaaggatgttttaatttacgaagtgccttagcttcgatttgacgaattctttcccgggttacactaaattcttttcctacttcttcaagcgttctagttcttccatcatctaaaccaaatcttaagcgtaatactttttcttcacgatcagttaattctaataagacttcattcaattcatcttttagaagttcattagcagcataatcatctggcgacattgcaccttcatcttcgataaaatctcctaaatgagaatcatcttcttcacctattggtgtttccaaagatactggttctaaagaaattttttgtatttcacgaactttttctggtgtcattccatccattttttcagcaatttcttcggcactaggctcacgccctaattcttgaatcaattgacgctgaattcttgtcaatttattaattgtttctaccatatgtacaggaatacgaattgttctagcttggtcagcaatagctcttgtaatagcttgacgaatccaccatgttgcataagttgaaaatttaaatcccttagtataatcaaatttctcgactgctttgattaaacccatgttaccttcttgaatcaaatctaaaaataacattcctcttccaacatatcttttagcaatcgatacaactaaacgtaagttagcagcagcgagttccttttttgcgtcttcatctccttctaaaatctttttagcaaggtctatctcctcatcatgagtaagcagttcaacgcgtccaatctcttttaaatacattttaactggatcattgatcttgacattacttcctaattgattttgatctaattccgcatcagcatcagcaacttgatacatatgaatcgtatcacctgtcatcatatcgaaatcaccagcaaaatctaaatctggagtatcaccatctaatcctaaatcatcatctagtcctaaatcatcatctaattcagcaggtacaccagctaataatacttcgtcttctacatctaaatcatctaatccatcatcagaaataacaatatcattatttccaataaattctaatagttcctctgcaagatcatcatttaaatcatatgtagataaataattatcaatttgatcttgtgttaatacaccatcttcttttttagcatcatttaaaacaatttgctttaaatcatcaaatgatactgcagttacatttttctttttcttcatatattactccttgtcttttaatgctatgatttcttttaatatttgcgccttttgtttaggatcaaaagtatctgccaatgcttttgttaattcttctttttttaccattacagttttttctttaattgtttcaatataatcatcaatggctttagtatcttttaacttaggtaatcctaattgcgatatctcaattatattttgaaccaagttttcatcttcaatactactgattaaatcagcaacctctaatacaacttcttgacgataataatcaataatataagaagcaatgattcgataaatatcattaaacataaaacctgcttttgcctcatacatcattgcgacatttttatcattcatcatatagtataataaatcacgttccgctcttatatatttatccaataatcgctgattttgaaattttggtattttaggtggctctgctgtctcaattcttacagctgtattttgattaattaactggtcaataatgtttcttgaaaaacctgattttttttctaattgctggatataatgatcttgatcaataatatcatctaatctactgatttctctggcaattgtttctaaataagatttacgatcttcataattatccatgtttgtcatttcataataataattcatcttaaaatctaatgaagataatggtctttttattacagcgtttaattcttctataccacgcttatccaaaatttcatcaggatccaaattatctggtaaatcaactaccttaacgatgaaaccagcactcaataatatatcaatgcttttaattgtagcatttctcccagcctgatcaccatctaaacataaatatacggtcttacttaaacgttttaataaatttaaatgcccatgtgtcaaggcggttcccataattgctactgcattttttattccagccttgtataatgcaataacatccataaatccttcagtaataatgatataacccgcttgtcgtgcttcttcgccaacgcggtgataattatataaagtatcacccttaataaaaattgatgactcgggcgaattcatatacttagattcattttggctttgtttatagattcgaccgctaaacccaacgacacgaccactagcatcatgtagtggaaacatgatcctgtctgtaaaacgatcatatccatttgaagcttcaataatcaaaccagactcaaacattgaaaccttattaaaattcattttttcaaacgcctttaatagtacatgattattaggggcgtatccaatttcaaaggtttcaataatttcatccgtaattttacgattatttaaatattctttagcttgaatcgctaacttagtattcaagtaatgattataaattttattggcttcatcatgcatacgatacagtggttctaacttttgatcgaccggcttaactcgactctctaaattatatttacttatatcaacgttaccaatattagcaaccatcttgacggcttcaatatatggtattttcaaataatcctttaaaaaagtaaaaacatttcccccatgatgacagacaaaacacataaatatttgtcgttctggtgaaattgacatcgatggatggctgtcatcatggaaaggacatatcgctacataattacggccttttttttctaagggaagatacgtgccaatgacatcaacaatatcaacactttgcctaatttcattaattttctctgatgatagtctcggcattaatgttcctccttattagaatgtgatctttttactaatataatcaactaattgattaattggtaaacgaatttgttccattgtgtcacggtcacgtacagttactgtctcgtcttccattgtatcaaaatcaacagttacacagtaaggtgttccaattgcatcttgacgtcgataacgttttccaatttgtccagcaacatcatattcacaattaaaatattttgctaactgactataaatttcagttgctttatcactttgttttttggttaatggcaagatagcaactttaaacggtgccacacttggatgtaatttcattacaactctagtttcaccatcttctaaaatttcttcctcataactatcacaaagtactgataagaaaagacgatcagcacctaccgaaggttcaataacataaggaatatatttttcattagttgttggatctaaatattctaaagattttttagaatgattttgatgttgggttaaatcgtaattagttcgatcagcaattccccataattcaccccaaccaaatgggaaattatattcaacatcacaagtggctttagaatagaaggaaagttcctctttttcatgatctctaaatcttaaattttcttcttttaatcctaaatcaaataaaaacttttgacaatatgatttccaataatcaaaccactctaaatcagtatctggtttacagaaaaattctaattccatttgttcaaattcacgcattctaaaaatgaagtttcctggtgtaatttcatttctaaaagctttcccgatttgaccaattccaaatggcacttttttacgtgatgttctttgaatgtttttaaagttaacaaagataccttgagctgtttctggtcttaaataaaccacatcttttgcatcttcgactacacccatttgagtttcgaacattaatttgaattgtcttacatcagtgaagttgcttttcccacaattaggacaaacaatattatgatccttgatatattttactgtctcttcactagaccatccttcactatgaacactcggatcataagcttcgattaatttatccgcacgatgacgggtcttacattccttacaatcaatcaaagggtcagagaatccaccaacatgtccactcgcttcccatacccgcggattcataaaaatagctgaatctaatcctacattatatggtgattcttgaataaaacgtttccaccacaattgtttaatattgtttttcatttcaacacctaaaggaccataatcccatgtgtttgctaagccatcatagatttcagaaccctgatatacaaatcctgaagtttttgcatgacttactaatttatccatatctttgcttgccataatttactccttatattcatgttattttagatatataaacaatgaatgacttgaacacagtcaagtcaaataaaggcaataatttgtttaatatctattttttcgtgcacatataaaatacccttatagtagttatttgtcaaccaactataagggtatcaaacaaaggttcgctgattcaaccaatcaagtacatctttatacacttcaagacgctgttgatcgtgtaataaatcatgatgactacgatcatagagcgataaagtaatatctttaactccttgatgactaagcgcttcatataaccatttaggccctacgccaaatttgccaaaaggatccttagcaccagaaattatcaaaactgataaatattcaggtattttttttatgttttggatagtagaaactttttttattaagccaaacacttcttcataagcgttattagtatatgtaaaatcagtaaacggatcttgctggtactgttctaactctcgagcatcaccagtaacataagttgcatttttagtacgagaaattaattgattgataacatttttacgaaccgttttggaacgatgcatatgtcctttaagcattgcatcccccttaataattagttttccaatcaatgcaaaatgaggtttgccacaggttcccattaatatagcaccttggataaagtccccatattgtgccatatattgtcgtaatactaatgaaccaagttgattgccaatcataaaatatggtaaatctggataccgagatgccataatatttcgcaagcgatgcatatcttcaactaatgtctttgttgcatcaccaatcccaaaataaccctgctcataattatataatgaagtcccatgacctggaaaatcactaacaacgacaacaaaaccatcgtgagctaaatattcagcaaaccgttcatagcgccctgaatgctctcccattgcatgatgaatctggataatagccttatagcgaatcattacagtcggtaaatatatatcaaaattgacatgtgttgccgttgctgatgtaaatttttcactatatttcatagctaatttctccttttcttttgatagttatttttagcctgataagagcgctgattattattgcgacgaggtcgaattaaacaattcttcccaaacccaattaaatcttttcggtttgcctgcactaaagcttcatacactaaatcataattctttggattacgatattgtatcaatgccctttgcattgctttctcttttgccgtctttggaacgtatacttcagacatatcacgaggatctaaaccagtataatacattgtcgtagataaagttccaggagtcggataaaaatcttgaacctgttctggctgatgatgaatatcccgtaaatattctgctaattcaatcgcatcatcaagtgtacacccaggatgtgatgacattagatacggaactaaaaattgttttttgttgtattcttcatttaattgataatatttatcaacaaatttctcatatagtcctctccgaggttttcccatcttatctaatacctgatcactaatatgttccggagctacttttaactgaccactaatatgattttgaactaactccttaaaaaaagtatcatctttatcatacattagataatcatatctaattcctgaacgaacaaaaaccttttttacgtttggtaatactcttagtttcctcaataattctaaataatcctgatgacttacttctagattattacaagctttaggccataaacactgtttagtcggacatgcaccatgtttattttgcttagaacaagcaggccctctaaagtttgcagtaggtcctccaacatcatgaatatatcctttaaattcaggatcccaaaccattttgctagcttcactaataattgattcatgcgaacgcgcttgaacaattcttccctgatgaaaagccaatgcacaaaagttacaagaaccaaagcatcctcgattactaattaaagaaaacttaacctcatcaattgcaggaacatgctgcttataactaggatgactatcacggttataagcatatgaataagcacgatcaaactctctttgcttcaacggacgattaggcctattttgaacaacataccatccttgatacggttctactaaagtttttgcattaaaatgatcagtatttaaatactgaatatgaaaagattttgcataagcttttttatcattacaaatttcctcatagcttggcaacataactggctcgtgagcatcatcgagatttttcgttttaaaaacagttccatctaaataagttaaatattttatttccaagccgctatcaagtgcttcagctacttcaataatgctattttcacccattccatacaataataaatctgcattagcatcaataattatcgatttacgtactttgttgtcccaataatcataatgtcctaaacgtcttaaactagcctcaatcccaccaataataatattagcatctttataagcttggcgtgccatttgactatacacgattacagcgcgatctggtcttttaaagccttcacttccgggtgtatataaatctttatgacgacgttttttagctactgtataatgattaaccattgagtcaatatttcctgatgaaatcaaaaaacctaatcgtggtttgccaaattgtctaaattcttcaacattatgccaatccggctgtgctaaaaaacatactttaaacccgtgactctctaaagttcggcaaattattgctgcaccaaatgaaggatgatcaacataagcatccccacatatatatacaaaatctggttgttgccaaccccttgcttccatttcttctcgatttattggtaaaaattcactcatgatcattcctctttctttatttacatattatatacacaattttacaaaaaataaataaaatcgacaaaagttgataaagttttgtcgattatttctatagattattgaattgacgaataaacttacgactttgaaacgtaatccccgtaaattcatcaatataagcctccataataggcatcaattcatcgattatattttcttctagatgaagcatatcaatattttctaattgccatttattaatatagcgaaaaccttttaaaacatcaactgttaatttttgatcatacattccaatacattcttgacagacaaatccaccactatgaattgaaactccagaaatatgatcaaggcgcccacaactgacacattgatcaacttctaaacttgaacctgttttttccataataaaggcattaaataataaatagaccaatttaggattatatccggtctgtaatgaacgtaatgctaataacagcgtattatatatagtctcatcaggatcattatccttagtaaatttataaacaaactcacaaaaataacttgcataagcttctaattcaatatcctctttaatatagcgaaaatattcaactggagcgcctttgatcaaatttgataaaccacttctaggaataaaagtaaattctgacaaagtgatagtttgacaagaaggggcatttttactttttaacttctttacccctttcgctattaatgccaatttgccataatcatgagtatagatccatagcagcatatcattttctttataaggcttattttttaaaactagtccagtaatattttcttcatcattaataatcatcttcgttatatccaaattcttttaaatatttttgtttgttgcgccaattattttcaaccttaacaaacaactctaaatgaactggtacttgtaaaaaacgtttcatctcgcgttgagcattctggcgaatctttttgatcatcgtcccttgtttacctacaataattcccttctgacttttacgatcacaaacaattgttgcaataatttctacacccgcttcatcttccagcattctttctatcacaattgcaacactatgtggtacttcttctttagtaaaataaagaattttttcacgaataaattcagccattacaaaacgctctgggtgatctgttaaatgatcttgaggataatacatattcccttctggcaaatatgcttttaccgttttaagtaataaatcaatattatcattagtagttgcactaattggaataatttctttaaaatcaaataattcctgccactcctgtaattttttaatcagctcttcttttgaaacagtatcaattttacttaatactaaaaacaccggcccatcggcttcctttaagcgctcaataataaatttatctccacgtccaattttttcattagccggtgctaaaaataaaactaggtcaacgccaaaaatgctatttaaagcggttgtattcataaatgttcccaaacgatcttgcggtttatgaatacctggtgtatccataaaaattatttgggcttcatcatcggtatgaattccttgaattgtatttctagttgtttgagcaacatcagacatgatagctaattttgtctctaaaatactatttaatagtgtcgattttccaacattaggacgaccaacgatacttacaaatcctgatttgaacatgttaaactttctcctataaatgcccgcggcaataattctttcattgttgttatttcataactttcacgattagccaaaatcactggacaatcttgtggtaatagttccatcaatacttggcgacatgctccacatggtgaaacaatctcatcactacctgccacaattgccagctgtttgatatcagctttaccatagccattgctatacgcaccataaacagcattacgttctgcgcacatagttgaaccaaacgctgcattttcaatattagtccctaaaaagtaatttccatctctcatctcaatacatgcccctactttgaattttgagtatggactataagaatttttcgctgcttcaaaagccttttcaattattgtttttacatccataaaaccacttctactcaacttaaatcatgatattgagtatttatcctttctaagtctataaattagcaataaactacttatcgtcttgtgatatttaaagcatctaaaattgatttttgcattgcaatcatctgtatttcgtcttcttctatcatgtgatcaaaccctaaaagatgtaataatccatgggtaaataaaaaacacatttcacgctttaaatcatgaccatattcttcagcttggactttagcatgatcaacagaaataaaaatatctccgatacttcttggcatccctgggacataaaactgctcattatcttctaatgcaaaactaattacatctgtggcccgatctattttacgatattctttatttatttcgtgaattttagaatcatctaccaagatgcatgataattctaaatcttcttcaattcccaattgttttgcagcttcattgattattgaacgataatcatcagtataatcttcattaaaaccagctgcttcatttatcaatgcaaaatcgatttccatacaattacctcatttacttatatatttttccatctctaattatagcacagtcaaataattcattcactaattttgtttgatgcgctacgattatcataatcgtatttggcaaattatcatgtatgtagcttataattttcttagctttataatcatctatattgcacaatgcttcatccaaaataagaacttctggtttttttatgatagctctgataagcattactatctgggcttgacctgacgataaaggctgaccatctgtttcaataatcaaatcaagacggtcaagatagtaatttaacccaaatatctttaacaatttttccatcagttcctcctctttactattcaaaatcaagttaaatcgcaatgattcatgataaaaaacaggttttcgatctaaataaataatctttcgatacaaagaattagtatcaatattcattaaatcgatcccattaatataaatatgcccctttaataactcatcatacttcatcagtaatttaagtaaggttgattttcccaccccagtatcaccttttaaccataatgaacgttcaatctgaagatccaaatgttgaagaatcggcttactataaccgtaactatagctaatatgatcaaaactaatcttactgattcgcccccttattttttgctttttttcacttctattaggaataatctctttataacgctcatataaaattaaaatttcatctttcttaataataaaagcaataacattaaacattggttcaatcatatacgataccagcatatagaaaaagataatatcaccaacactaatacttccttttttataatgaaaactagccaataatacaacgccaaaagataataattgaattaatgtttcactaataaaattcaacttatttaattcactgtcccgttgataaaggctataattatattcctcaaataaataattaagcttttctttaataaattttttcaaaaaaaactgatggctattataaatatttttcaaatactcaagatgtccttgattcattatttcttggtttacaacaatttgtttatttaaaccattaactattttaagccatttaattgtaacgatagtaataatacttaaaaaagctattacaaccaaagctaaattcattgaaaatagtattaaggcacttaacaaaccaataattaaaattaaatcaacaaatagagccatataaaaatgaataaaaaaatcacttagctgaaacaaattttgaacttttgtaagaagaactccttcttgatttcgataataataactaaagggaagatacagcatatttacgacacttttatttacatattcttgatttaaatatcgctgaatttctatttccaattgtttcctttgaaaattgatcatgattctaatcccacttattatcataaaaacacctgtaaaaattaaaatcataatataattcatcccattgatttgatctactaacccttggaaataatatgatcctaaaacactacagcaagaaatcaaaatagctttagcaacaagtctgataatataacagtaattattttttaaatgaagtattatgaaactaataaaactttgttcctgatgtcgactagaaactctgtatcttccaacatgatgaatgcagatacaaattcctgtataatctttttcaatcgactcttttgttcttttggttaacccatgggcaggatcaccaattaataagtatttttttgttgcccgatataacaccacataatgtgttagttcaccatttaaaagatgaattatacaaggtgattttgtctcctttagtaatgtatttaaatcactttgataagctttagcatctaaatgatacgattcaaaacatttgattattccataaacactaattccctcattagtcactttacaacgttctttgatttctttgatttcaatatctaaatgataatattttaaaatcattttaatgcagtatgctccacaactataattattatcttgtttgtatattgggtatttaaacataataaaaaacctcctattatcatttactaactaaggaggaaaattacttcttttttattgaagttttaagatatcttcatcatctatatgcatttttgctactgcaatcgctgcataactataatctatactaactcgttcatatttatcctgggctaaaaaatccttcttaatgcgattaatcgcttttactactccattttcatcacaatcaagcaaaatcaaaaattgtttcatactatatttacaaacaatatcacctaatcttaatgaatttaaaataactttttctaaaatattggatgtttcttctaaaacaagattataaatttctaaattatttttaatataatttttaggtgtaatagtcaatactgctaacgtctttttagttctattacgaattgattttcgtgcttccaaacgatatgactttttaaaaaaatcataatcgcaactatatgcacctctcgtctttgtttcaatcaagtcatcttgaatagaaaaaatatttctttcttcagcattattgacattataatttaaataatacttcattttcctaatcgttgcatttcccaaatcatcttttaaagcggaagtgactttattatagtgttctttagctaaagttatcttatcttgtttaactaatgcaagaactaaaatagcattaatgttctcatcaagataattatcagctaaatttttcatacaaatttcttcaataattccatactcttccttttttaaataaaattcaatcaagaatcgtgatacatttaaaaattgtgagttcaaaaaacctctaataatcgataacttttccacattttctatcattggcaaaaattcaccactatatcgataataagctttcatataatatttagctcttatttcctcatcatgaatctcatttcgtcctaaacgatgatacaaggtaaagtcatctacatcaaaaatcatctctatttcaggattccaataatatgttccttgtgaagataaaatataatcatactcacctaaattattttttaaaatggttctcaaacgataaatcaaagcctttaacgcattagctggattatttgattcacctgaagcaaacattaattcttgtaaatcattagaacttaatttacgacgatgatgataaataatataagctaataatttagccaacttgggtgaattaattatattaaaatctagccaatgatcttcatccaatttaatcacataggcattaaaaaaatcaaccttaagtttcactaaatcacccccactaataatattataattaataatttctaaaattatcaaaattaacataaataacataattttattatttattttttaacccgcaaactcttcttaacattataacaatcaccctaatatatgtccattaaattaaactatgtttcttagtaataattaaatgtaaaaagcaatccaattaagaattgcttttactaaggataggaatgatcaaattatttatgcctgttgagcctttttctttttgattacaaaagcaacgattccagcgattattgcaacagttgcaaaacctccaccgattacataagcagtattattactagttgacttatcaccctttgccaatggtgtttcattttcatcaactacttcagtttgtggttcctcatatggaacgatttgtccatcttgatctactgttgtaactgttccatctggattagtaatcattggattaccagttccaccatcgattgtaaaattagttcctcctggagtagtagcagccaaatccgtcccagtttcaccaggaataaattctatttcattttgtgtatcattaacatcacgataaaccattacatagtttcttcttgttgaataaaaatcatgtgaataactagttgcttgtccgctcattaatacatacgttgttccattagcctcatattgtgcaggaacttcaatatttagttcttgaccaacattggcttctaatttagttgtgtataatgtatcttctcctacatatgtgtttgaaacattcatatatgttacagatacttcatatttatcaacttctaaacctttttcattaaaataaacattgtattctgtagtttcctcaccaaatttatgagtaattgtactttcttgatttggacttaaaacataagtcttaccatcaatttcaacagttgtgtcaacttcaattgtttttgtttttccaggatcaactgtatattgatgaatttgtaaatcttctccagttgctaaatcaacataatttacttgaattggttgtggtgtattttcatcagtaataacttgtttatattctacttggtatgtttttgttgcatcaccaaaagtatgagtgattttagctccatcaactacctcgtattgttttccacccttcataaatgttttagatggtgtatgatcaacagtcttatctttttctactaacaattttttcgttaaaattgcactaccagtagccttatctacatattgaatatagatattatatggcttactagctacatcatcttggacttgatagcgaacaattgatctcatttgaccttgtgcataagtttgacttactgttgctttttgcccagcaattcttttataagttctaccattgattgttgaaacgaacgtttctggtgtattaacagaaccaccattagcttctgttacttgataagaaagtatcttatgctcaacaccatcttgatcaatcaaagcaactgtactagtatatggtgtttgtgctctttttgtatacttaaaatcaattgaacgtgttccataaggaacagatatatagttattaccattaatatcataaacactgcttccaagtgtgatcgtacttggtgcagtataggttccattattgttataagtacaagttactgttttagcactcattaattctgtcccatcaactgtactaaatgttacattaatatagtattgatttaaactagcaatttcttgaacggccgcagcatcttgtgctaatactgtcaaatgtgaactaccatttacagcaggtacttcaattcgcttagtttcacctcttgcaatactaacaccgttagtctcacctgttccagttgcctcccatgcaaatgtagttgcttctccattgttttttactgtgaaaactctagtatcaggattgttagaaacagctgtccctaacattaaatttgaagcagcttcagcattgatcatcactcctgtaactggcataacaatcatcgctagaaccactaataatctgaataatttctttttcataggtcattccccctttaaatctttcaatccatttcctttttacacacttataatagcattcgagtatcacactcttatcacaaaaaacaataaaattagcaaatagtcaaaaaactttaatttatcatacaaagaggcaggttttaatctgcctctttataaattagctagattttctcagcttttttagcttttctttttttatttgatacaaagtatactgctcctaaagccaatattgaactaaatcctaagacaacatatccatttatatcagaactatcaccagttgcagtgctgcctgttttagttaattttgtatctgttgggtcatatactccacaatcccatgtcatatcatatccatcttgatctaaatagaatgaacgggtataataccaaactccatcttcgctataaataccatcactatcttcagcactatcttcaccttgagtagacaatgtaactttgtattttgatggaatttcaaatttaactcgataatatccttctgatagctcattgaaaatataatatccttggctatttgtataagttgtacctacttcttgccaatcattttcatcagcaatattacctgttaaattagtttctaaaataactttaataccttcaatacctgttccattttcatcttgaatgccattgacatttgtatcataccaaacataatcacccacagaaccttttgattgaacgattccagcatcccatgttaaatctactgtattatatgctaaatcaatagtttgagttgggaaaccaagtcctggtacatattcatttaaagcattagaatctagttctggatcatccccagcatatggaactgtcaattttgtagtaagtggtaaatcaaagattacacgatattcaataccagtataagttgaaccctttaagttatcaaaacgatatctaccatcttgatcagttattgtatttgcaattgatgtccatacttcttcacctttttgtctagcaaacaaatatactggtacatccggcatcacgatatctgtttcatcttgaagaccatcagcattaacatctttgaaaacatagtctcctaaactgctatacaatcttgcaccaccatcaacattatcaactcttgtattgacaggaatattaataactcctgtatatcccgacatcctattctcattagtctcaatatgataagccacatcactatcaagcgtatcatcatcaccaacatctgcttcaataaccttatatccttcagggtatgtgaatttaacaacatatgttccagaatctaaataatcaaataaatagcttccatcttcaccaactacagtagatgcgactaattctgttgggatattattttcaattccaaattcttcatcaacccgatataattcaacaatcgtaccaggtaatttgatatcaacatctttaccatcactatcttgataattttgaatatcagaataatcacgatcttcaaatgcaacaccagatattgcactataaactgttaacccagcatcaattgtcatatcacttgtatgataagctaaatcaattacttcactacgagcaattaaagtattcttattttcatcagtaatagttggattagaatcaattgcactatctgttgttccaccatttttagtaaagtagaaacgttccgcgtgtccaccacccattgttggtttaacaccacgaatatcaaattcaacaacataacttccatcttctaaatcagtaaataaatagtaaccattttcatcagttctagtagttttttctggagtaccactaacctcaccattagttactgtataaagatttacaatcacatcttttacaccagtttcttctggatcttgaataccatttttattttcatcaaaccagacaaaatctcctagagatcctaatgcaacgtatcctgcatctaatgttaaattagtttctcctactaagctgccatcagcttgtttagttgcggtcaaagtaaataattctgtcttacaataatcatccttattaagatcatttccaatattagaatcagcttcaatttgtggttttccatcaacatcttgagcgtatctttgagttggctcatatttatataaagactcatcttctggaatagcaaattcaacttgatactgataatacttgttaccaacataatcatttggattagttgatgatgaatccgtcttaccatcttttaaaacattacaatcttgatttgtaaattcatatttaccactggcatcagtcaaagttgtttctgaatctaattctttagttacttttccttcattttgattaatcgttgtaacaaatttatgcaatgttacatttaaaccttgaaccggtaaatcattgctatcttgtaaaccatcacggttcatatcatagaatgcataatcaccgattgttcctttaggtaatgcaatctcagctttaacttcaagattttcaacaatatcactgtcatttacagtatctagaccagtacgtttaactgcaactaaagcagagttagacattaacttaccagatactttctctaaatctgaagtactgtactcaggagcagacatgttgacatgcaattcaattgactgattaggttctaatggcgcattagagaaatcaaattcaacagcaatagcactaactagtcttaaatcaatatcatttgatgcttctatccattgatgagcgccgcttgtccaatcatcatcatccatattaccatatacaattggcaattcttctgaagcagttttacttgtacgggcatcttgtttccattcatcccatttagtatcttcactttcaccaacacaatagtagactttataagaaacacccggtgttaaacaatctacataatttaaaattggtgatttatcaagatttgtaacccttgcagtatagttatcatttgtacgattaactaacgagtcaccttcaaatggtaaaatatctacaacacgcgccttactaacagcacgatctgatttttcaccatttttaaatacaatcttataatccaaatcttcgccaggagctgttttagcaatctgattattatttaaataatcatcatcataaatacctttaacttgtttatagattgataaataattttgttcattgattttaatgattccgttactatttggatactttaatccatcaccggtttcatctggtttattagtaatttcatctagcacactgtcagcaacaagtgtattgtaactagaacctgtagcggattcgacagtaaaactatttccataaggattttcagctgacaaagcaataatttttccactagtaaagtatgctggtgcccataatgttgtgctagtatcattaattgaactagttcctttataactaatctgtatcttcattccaggtttaaatttaaaatcttcacctaaatcaattgttatcttcttagtttttgatgtcgtttcaactaattgattattttcaacaacacgagcaggaacatcattagtataagtaacagtatattcatctggttctaatgctttacctgaggtatctccatcatgttcaaatactattacttggaacctagtttgtaaatctcctatactataactattattatttagtgacataccgataggtaaatcaaaactaataattggttgttcaataatttcattttccttagtggattcatttttaacagtaattacactttcaatagtttcacctggcttataagttttatccttctcaccagaaacaattcctagtgaaactcgaggagttactgattcttttaaaggataatatagatttactatatctgaaacttttgtatactgcgcattttgatcattaccttcattatctttaagtgtatagttatatgttacacttgtttggtttgagactcttctaacttcatgaacagtcgcatctgaaggacgtttattaaatgtcacattcacatcaattcctgtagcattaaaattctctgcaattaagtccttgctaacaacatttgtatatactactttgatttttaatgcatttaaaccttctaaactaattccttgactattcgttgagacatcagcaactaaactattattagtcgtccattcatcactaccagctgtttgatagtatactcgagcttgaatcttattaccatttttatcagttgcactatgaactgttacagtattaactacataaggtgcatctggcatatattcaaccgaattaccattagcatcataataatacattttaattaaactatcttccacttcaacacttcttactggtacatcatttttagcttgagcatattctctcaataagaatgtttctgtatccgcagcatctaataatggtgtttcaacagtctttgcagttaataaagtgttattatcaccatcaatatactttatgatcttaccatcaatatccataatatcagattgctttttattcttaaattcaagatagtttttactctgttctgataaaataactgtttcatcttggactggatatacttttacagattgttcgatgtcatgatacttgtcatcaagagtataaccatcaggcgctttaatttctgtaactacataagttgtaccttctttattagctggcagtaattctgttttagctattccatcttcatttgtagtaataataattggtacaaaaccactatcgttaggattagttattttaaatactgcccctgctaagttttcattagcatcacttgtctttttaacaactattttacccatattagaatggttgattattttaccatctgtatttggtaagtattcttttactgtactttgtcctgattcaacagtaacaggatacacagtagtatcaagttcaaaaccgtctaaagtcgcaacttcttttacataataatttccagcaggaacatcagtccatataattttaccatctttaccagtagtttttactgtttgaactaagtcaccagattcttggtacaatccaaattcaacaccttctaagactttatttcccacatttgaatagttactgcgatcatcatatttagtaataaccactttaccaagggcttgattaaccactgtatttgcatctttagaagtaactgttgtcactttgccggcttcaatcgtaaattcaattggctgcataatctcgaaattgtctggcgcagtgatttctactaactgatatttaccagtttcaattaccgaagattcaaatttaccatctgtattttctatcgtaaatgaatccaaataattctcataatctccatctgtattctttttcatcaattggaaagtagctccacttaaaccttttccttcaggatcagttttagtaaatgtaaacttaccagctgttgtcgtattaataataggaccatgattttgagcatcatctgtttttccagcttcggtataaacaatattttgttctccttcagttacctcaacagcatatacatcattcataactgtttcatcataaccatcaggaaccttcgtttcaacaaataaatattttcctttttctaaattatcaaagatgacaattcctaaagtatcactattttttactattccattaaccttttcatcatcttgcagtttactatcaccatttacatctttatataaagtaaattcagctccagctaatgggaaacgtgtagtcttactatcatttgctccataaatagaccattctgatatcttttcgattttaatacttcctaaaggttcattttcaacttcaatagttgttacttctccattagttttggttgtaactttaattcgattagaatctttgattacataaccatttggtgatatatcttcttgtaaataataagtagtgttcgggcgtaaattatcaaaaacaattcctttatctttttgatacgttgcagtagcaactaaattcccatccgtttgagcatcatataaactaaatgttgtaccgtctaacttatcaatttcttttccagtatgactatcttttttaattactttaagtgattgtttcatcatattagtaatttcaatttttccatcagtaccagtaacttttagagcctctactgtgtaaggaccataaagagtatcatttaagaaataatcgttattagtagatttctcttttagtgtatattccccagccggtaataattttgttctagcaacaccatttttatttgttttaattgtatcgactaagattccggattcattaaacacttcaaaaacaacatcagctaatttctttgttttatcataatgatcaactttcgtaatttctaatttgccataagatgaagtattactgataacattatcggctttacctgattcattaccattttcgtcaactttgacaatctcttttgtaatatctccaggtgtaatggtaaacttaccaagatatgcataatccgcaaaaccattatttttatttgtagtacctacagtagtttcttgtaagatgtaatcacctgcttctaaccactttttactagtaacatcagttccattaactttgaactgaagcttaccattagattgcgatactgctgttccaactaaattagtagacgataaatctagggtaccgtcagctaatttaactgatttatatacattaaagtttactccacttaaagcaaccggattagttagaccattagcatctagataggttccttgttttgttaattcaacactaccctttggtacatttgttacaaccaatgggttcttgacagcatctgaaaccgtagtataaacgctaccatctaaaccagtaactttatctgcttcgattgtaaattcacgtggtgttggattcaatacatacccatcagtactaatcaaactttcaaccagcacataatttccaggtttcaaatagtctgtcaatacagcattttgattaccatttgtcgtgatagttgaaattggtgtatctttactataatcatgtccagcctcgtcatttttagcataaatattgaatgtcgcttttatataagtatttgaattagtactagacaccttattcaatgctaatttaccataattactagtattaacaatcacattagaagcatctgcttgatctgaatagagatccgtattatcggtatcaaaacctaaattaactaaatatttagtagtatctggtgcaacgacatgctctggtaatgaagttatatcttcttcaactacatataatccagctggagaaggagctgtcataaagctgcctgttttccctgaagaaatagtaccagttgtataagttacttcttctcccgttttaatataccacttatcacctattttaaatgcatcagcaacgctttcattcgattctacaactggatatactttgaaattaattcctgttaatgctgattgttcacctgcaaattttaaaactttactaacccagatctgacgatatttataatttataaatgtaaccgtttcattagtatcagcatcctttaaaaaatacaccttaccattgacttcaacagtcactttacgaatatctgtgtttttattatagccagctggctgttttaattcagtaacataataagtttgagtagaatcaatattttcaaacttgaagtacttatcagtagatacagctgtacttaccaaatcatattctgcccatttttctgaatcagcaattacctcatctatttcagtttgacttaacttattcaatctatctgcaccagtttcagtactaaacaatcccatggtagcaccagcaagtaatttttctgcctcattgtatttataaccgattggattagtcaataaatagttctgtacttcgatttcgctaatatgttgtgctttgatttcaccaacataccaccattcgtggattattccataatagtctggagctcttacttcttgtaatactacttctttacctggatcaaggaaaactgaataaccaaccccaggatcttttgaggatttaccatttgcatcatataaaacagctgttcccgaaataatctttgttgaaatcccactatcacttacagtatattttttaccatcattagcagtaattgtttggcttccattgctatcaacgtaataaattttaaactctgctccatctaatagaactgtcttatcttcatttgttttagttaattttatttttccttttttaggtgtgttttcaaatgtaacatgcgttgttttaccagcctcaagttcaactacttttggtggttgttgttcataatcattttgctgctcagcagttaaattttcttcaacaatatagaatcccggctctaatcctgaaaccgtcttctctacaacatcactttcaatcgttgctaaagcattaccatctttaacataccatttatcatctttactaattgcgccatcttcatctgatgatacttcttttgctttatagacactaaattttattcctgctagcggttcactaacatctttattatccttatctaaccatttagctgttttaactaaaccaaggctgctgtatggcacattttcaattggattttcaacataaactttatttgttttaccttcaacaatctcaaattcatgtggagttggatcaattgtatagtttccaaccacagctttttcaattaatacatatttccccggtgctaagaattcactagtaaccacattaccatcagcttttgtcgtaagtacatacactggatcaccagtataatttcctgtttcattccatttataaacattaaatgtcgctgctactccagtatcactgtcaactgagctgacctttttaactgccaccttacctttgatcaaacggttgactacatcaacatttgatactaatttatcatcagtatttgagccaggctttacagttacgacctttgcattaccaccttcaacttcaaattctgatttaacatttttttcaacaacccaatattctccagcatctactatttttgaagtagcgataccatcattattagttgtaactgttaaaagcgtcttattagtatcagcaattttacggtcctcatcaatattcgtacttaacttaggaaaatattcaaacgttatatttcccgctggtttagcgatagtttcatcaatattaaatgaagtctttgtaattgtaaacttacctttaggaacattttcaacaatctctttgctctcataaactaatgaattatttgtatcattaacttgtggtgcggtaaatgaatattcagtcgtatttaatgtatatccatccggtgctttggtttcaacgtaataatatgttgctccaggtgttaatccagtaaagattacatacccttgaccattagattcaattccttcatcaattacctttttatcagcatctaataatttaaattccgctttatataagccagtattatgatctaaagatgacacttttctaatcatatatccaactaacggatcgttagaaacagttttactagtttctttattattttcaatcttaaaatcaatatttttcgtattaacagcatagccagttaacttcgaagtttcctttaagtagtattcaccagcttctaaaaacttagttttagctttaccatcactatctgttttaattgtatcaactttagtatcattatctttacggtaaacatcaaatgttacattggcaagtggctcctttgttttagaatctattttagtcacttctaaatatcctaatgtagttgattcattcatgatctctttagtagctgtttttccagattgaatttcgactgtaattacatctgttaattgattatagccactaggcgcttcaaattcttttaaataatatgttccagcagctaactcaactttattagaatttgaactacttgaaaccgaattgttagattcaattacaattggattacccgcatcatcttttacaaggctatcatctgtagcatttttatttgtataaacatggaatttagctccagctaaattaaccgtaatagttggataatcttttaatgatccttttttcaagatttgtaaatatcctaattcttcattttttactgtaacttcatttaatgtttgcgtttttaattctgtcacataataattttcatcaagtttataatgattgggtgctttagtttcttgatatacataaaaacctttaactaaagcttttgattcctcattaccatttaaagtaaaactgtccacactactgaaatcttcagactcaatagctatattagcggtttctttagattcaaaaggcccataaacagtaaattcagcaccatttaatttttttgtttctgtcaatgcatcaactttattaataattaatttacctttgttcgaactatttacaacatatggcaccccagtattgtgatcttgtagcattaaagatggatagtttactttatttgcttcaactttaacgtcccatttataaacatccggtttatcatattctgcacttgaaaaatcttcctcaacagtataatcacctgcaataattccttcaaataagactaatcctttatcatttgaaacagtttcatatttatctccagttactttattggtcaaaataaattttactcccgcaagcggtccatgctggctattcgttgcacttgttcccactttattaaatgcaacataaccaaatccttgagcagttgtaagattatttatttctaattttccattttcaattttcttaccatccaaataaactacagctttattattttcatttttaacttcaattttataaatcgtttcaccattagcactatcaacaccatctccaataaatggtaaattgccaacagtttctttcaaataatatgttccttcagaaattttagcaaaatttactttaccatccttatcaataactttgctattgccaactgtgttaccatcaatatcagtcgcagcattttgacacgcttcatcagtatacagtccaaacgctatacgtgaatcagtattttgataataacaatcttgtttttcttgatcaaaaataaatttattatcaccaacaatactgttgtcaccattaacagtaacatatttggtaatatccaaatttgttgttggcgcattttcatctacccagccaacatttacaggagcattagcacttacatacttaggcgtattttctcccaaaggaagatatttcaactcaaccttattatccaaaataaacggaatatcatctttttcatttggtaagacacgataagcatctttgctataattcgcattaatcgtataagtagttagcattgcagcaccatctggtacataattagtatcatccgggttgctttcgtaagtacttatataataaattttaattgcttttacagtaccattttcatttaaaactaattcataatctttatcagcaccttcttctagtactttatctcccactttgatagagatattagcagctcccccatcttcacgtcctgctggagcaaccggtaaagtatccactaattcaaatgtcgtacagttaagccgaccataattattacctaaatccgtaagattactacctggagcggcagttactttgtaatcgacactataatagtctttcccatctattgatttaatcgtgtaattattaccatctgcttgctgaataacatttttccctacagtccattcttgactagcttttgcggtaactgaagcatcaggtacagagactgggttaattgtataacttccattttcattaaccatagaacctgtcattttcatatcaacaaacttagcagttgtgccattcttagttgtcatattcttaaaatgcatttttaaatataacgtacctgattgtccagccgccaattctttacttttaattgatagaatatttttccctagtgatgttctttgttcaattgaatcaaaaccagtattactaatatctgttgtttcatcgaactcaatatcgtttggcaacgtgatactcaacgtacactcagtatacttggaagcatctgtacttgctgaaacagcataataaattgccaaaaagaatgaatctcctgaatcagcttgtgaaacatcaacatcctgtccattgactttttctacgattcgtgagttaaatgtaatgttcgcatcagcattaccatcaaccgcattaattatggttccatttgacatcaccccaattaacatagccaatactaacgataaaattccaaactgtttaaccattttggttttcttgagttttttcattaaattacccattctctaattctcccccttttatttatctgattttcttcaaatcatttgttaaaataatctcatcgtgtttcttcttttcattataacgattagtaatgcgatcaaccgctatttttgcgccatctaaatccggtgaggcaagaatcaatgaatattgtgtcatattaaactttgaataaacatcattttttctcaaactatttgaaatcacttctcttaaaatatctgcttcttggcgaatcgccttttcgtctaaacaaccacttgtatcaacgatcgtaagtaaagttaaaattcgtgctttcatcgaacgtcttgctgaacgaacattgatttgataaatatttttaaaaacgtcaaaatcacaataaaatgtattatcattgttatcatcaactgttagactcttttccaattcttcaacatcaatttgtgtcgcaggagaagtatctagaatcatttcataaatttctttcagtcgctgtgacacttcaattccatatttactatagtaataatctacgatttgacgataaaatgataatgcaagatctgttttacctgtcttataataagcataaagtttcatttcatataatcgtgtatccattattttttgactgttttggtgattacaaatttgtaaaacctgttcatataagttattgttagctaaaatcgttaaagtttttaaaattgcctctaaacaattacgttctaacaaattatttatttctaagatccagtcattataattaaactctggtaaaacctctccatgatatttgttgatcatttctaaacagcgttcatgcttgcggtaaggatcatcttcctgttcaacacgacgacaaagtttcaacatctcctcataatcaactcgacattcaacttcaggattccaataataacttcgtcccttagatttaatacaatcaacttctttaaaaaactgtttcatttcctttcgagctcgataaatcagatttcttaatgctccttccggtttatcagcatttccatctgaccaaagaaaatcaatcagttgtggattagttatattagcatttcgattaagaattaaatatacaatcaacaactcaacttgaacacttcgtttcttttcttgaggaaattcattttccccatcagtgatatgcagtctacctaaggtcttgatttttaatactaattttttatccataaaaatcactcccttgtttacatgtttcaacatcataattatactatattccaattatgatattttcttattcaaaaaaataaatcgtcttttttcaagactttaaataaaatataaccgttttgtaaccaaaataatatataattaaaattttctttcaatcaaattcggatttgatgcatacatgactgctgtctcttttgtaatcttattttgtttatataaatcaacgatcgcatcatccatagtaaccataccaatttggcgattagtagatatagcattatcaatttggtgcgttttaccatcacgaatcaatgttctaattgcttgattacaaatcatgatttcaaatacgggtatcattttaccatcaatacctggtactaattgttgggagatgactgcattaagtaccattgccagctgaactcgaatttgctgctgctgtgaaggaggaaacacatcaatcattcgatcaatcgtattagcagcaccaactgtatgcaaacttgaaaaaaccaaatgccccgtctcagctgccgtaactgcaatatcaatagtttctaagtcacgcatttcaccaactaaaataacttctggcgcctcccgtaaagctgctcttaacgcagaaacatagtcatgggtatcgtgataaacttctcgttgtgaaacgatacttttgtcatgactatgcaaatattcaataggatcttcaattgtaataatgtgtgtatttcgattacgattgatctgatcaataatacaggctaatgtcgtagatttaccgcttcctgccgggccggttactaagaccattcctttcttttgattagctaggtcagtaattacttttggaatatgcattacttcaggatcaggaagttgaaaactaacaacacgtaatactgcggcacaagagtttctttgacgataagcattgacccgaaaccgccctacattaggaatagaaaaagaaaaatcatcatcgccacttctcataaattcttcaattccagcgttattagcaatttcataaatatcacgaatcatccgctcagtatcatgtggtgtcaaacgttcatcgctatattttgaaattctcccatctatcttaatagcacaaggcgaacctgcaacaataaagatatcagaagcccctttagttactacttcttctaataatttttttatttccattttattcctccagattaattgtttttaaactaattattttgagactatcattttcttgcacaaatgacagctgtaaaacttgagaatcatttattttatcttcaagcatatataaatcatcttctttttgatactcgatttgaagattttctaaactatattctaaattttgactatctaattgataatatttggttaacagccgtgactcactttcgtaatattgactagtaatattagcttggcgaacgcttgactcataataagaattagctcgcaaatatgataatattgccagtacacacataactaaaatcacaaaaatcataaaaattgatggcgccccaattcccaaacgcattgaagtatgtttcttattcatcgtgattacctcctaatacaaaaggcaattcactgataacttcgtttttattctttatcattatttttccttgagtaatcacatctctatctatttcaataaaaatattatctttttgataatgattctcatcgattttttctacttccaataattgttctaaatcagcctgcggataagcttgcattgtttcaatcatactttgcgcctcaattaatgcattttgcaaattagtcccttgtacttgtttatttttagcttgcactataaatgaggcacatactgttgttgaagcagcaaaaaagaggataactatgattaattccattaaaaacgaaaatgactgtacttttgatttcatactttcctcctatccatgtaaataaattgaaatacttttgctaacttgatcacgtgtaactgtaaatttaaataaacggtctttttgttctattttaaaatcatctaatgcaaataacttactaccctcttgtaaccccgcatgatagtcattacttgtatataattccttgagataaccatcttgacaataaatataagtaaccgtcttagcagttttaatttctaaacattgcgtattatctatttcaacaattttagtcgaatcgtcactatcatttgcttttaacttcgtgtttaaataagccaaaggcacaattaaatcatcttcttgttgacacgtatcattaataacttgatatccttttatttcataagtaacaataaagaaagacccaattacaaaaagcaagaacaatgacagcgaaaataatacatgtatattacgatgtttattcatagttcttctcctttttaaatacctcgattcgtggttgtaaattatctccttcataataataaataacctgataatcttcatcatttaaaagcaacccataattttccttcaaatactcaatatctttaggatatttgccttcaatactataacattttaaactaagttgattaattgtatcactaacccgttttagatcctcatttgatgaatatgttgaagtagaattgaaagcataaatgcttaccatgattataactatcagtaagattatctttaacatatttttcataaataacctcctataaagaggacatgatactaattaatggcaacattaccgacatcaagactattcccactactaaagataacaaagttacaatcgttggttctatgatatttaaaaattggtctatcgcacgactaacttcttcttgaaaactatttgataattgtttcatgattatatcaacctgtccagttttaaaaccgacctgaattatatttaactgcattccttgataaatttgatattttttgataacttcaacgaaactatcaccatttatgagatcttcattgcatttttctaaattagccctaagctgtttatcatcaactaattttggtacaaacttcattgcctcttgtaaatcataaccactagaaataaacaatgacaaagcataagtaatttgagctttatttaatgctcttgacaatttccttgttaaaaaagatttctgcactacgcttgacaagacatttacatgggtaatgcgctgatataaatatccagcaataattactatcaccagcactaacaagaccgcaaaacatatcaatgaaaaaatttgaccaaattccataaaactattagcatacgatgataaatcactgcctagtccatttaaaacatctttaaaaattggtaatactttaaatacaatgattcctacaaccaccaccatcataataattaaaatgattggataagttaaagcctgtttcagtttatttgttatatcatcaattcgagcataatattcacttaatgattgcataacatcatctaaattaccgctcgtttcacccactttgactaaattaaccatatagtcatcaaaagctttagttagatcgattgcttcactaaaacttacttgttcatctaaatatttagcaacttcttgaagaacccctttaatgtttttatcatccatttcttcatataccatcgtaaccccttgattaagactaaatcccgattctaagatcattgccatctggttacaaaacatatatttttcactcatcgtcaatttcatcgtttttctccttaataacgtgctgtttcaacgtattttccctcataatcatacttagtgcttgcgaaagtcggatccataatcgtccatgtatctttatccataaaaatatccggattgacccaaccctgccctttaacataaacttctaaccaagaatgatattcatctttatcagtccccccacaaatcagtcgggctggaatatgattgattcttaacattgccgtcatcattgaagcataatcaaaacatatgccctttttattgttaattatttcatctaaatttggaatcaaatactgctgttttgctaaagctactttatcatcgtcatagtttatgtaattagccacaaattcatagactttttttattcgttttaaatcattatcttcatccttcacttcatcaatagctaacgtcgtaatcgcatcacccggtttataattaaccaagatattaggatataaaaaggggagcagttcgttatctaaaataacatcaacttccacacttttttttattgcatattgggtaccctcaatattttctaaaattttaatcaaatattttccatttcccaactggagtggataactcactccttgttcatccgttaaatcataatttagtttttgttcatctttactaatttgaatttttattcgtttactaacacctggttttaaaaaggccattacatatccttgattagtattagaataatcaaccttcgctacatcactatctaaaaccagtgtccctgatgcttcaggataaagaatctcatcaactgtataactttttgatgttggataatcacttgggtattcttgattactgttattatcacttgaacatccagtaagaagacatgataatacagtgactaccactagtattcgcttgtacattaccattatcctccttaattttaattatacaccgaaatatctgggattgaaaagaaaaaggcaaaaagaaaaactctctctaccttaactaattcctatataatataaaccaatctgtatgattccagctattaccatcactgtaatcgggttcattttctgtttccttaataaaaccagagcaactataaatatggctacagaaccaaatttcaaatttgcaaagtttactgtatctccaaaaaaacagctaacaataatcaatagtcctgaaactgcaatcagcgacactacagccggacgaatatattttaaaatattttgaataattgacatttgctgatattttaaataaatataagcaatcagcgatacaataatacatgaaggtaaaatgcatcccaatgtcgctactatagccccataaaaactatctatctttaatccaacaaatgttgccgcattaattgcaatcggtccaggtgtcatctgggatatcgttattaaatctgttaactcattcatcgtcaaccaatgatataaatcaactacttgatgctgaatcagcggtaaagcagcatatcctcctccaaaactaaatgcaccaatttgaagaaaactgaaaaacaaagttaaaagtttcattgtctttccctccatctgcttaccatattttgtataattccaataaatccacaacttaagattacgtaaataacatttacattaaaaagatatgttgcaataaaagcacataccataattataattggtaagatttctttttctttaacaacccctactgccatatcataagcaactgaagcaattactgccccaactccagcctgcattccagaaagcattaaggcaattatctcattgcttttaaaaatttcataaaacactgacactaatgataaaattacaaacggtggcaaaatcgtcgctaaaatagaaactatcgcacctttgattcccgctaatttaaaaccaactacaattgcaccatttactgcaattgcccctggggcagattgggcaatggcaatcaagtcaagcatttctttttcatcgatccagttgaactcatcaacatattttttcttcatcaatgtcacaattacatagccaccgccaaatgtaaaagcacttaaataaagatttgttacaaaaagcttcaacaacattccttttttcatcatatcaccttccctatagtatagtgctaaattatgatgatgtaaaacaaaagataacattactattgcaatgttatcttaaacaattccttttttctatcttttaaaagtaaagattaactattaatttcatcaataacttcagtaaatatactaatcatctcatcaacatctttttcttcaatgatgaatggcggcaacattctaattacatttgttcccgcagtaatcaacactagacctttatcgagagctttttgaatatatggtttgactggatgatcaaattctaagccaagcattagtcctaaaccgcgacgttccttaataaaatcatatttttcaactagttcatctaatttagtaatcaaatattcactgacatcttgaacatgatcaagcatttgcgtttcttctaaaatcttaaagactgtcttacaagcttttccagccatagggttaccaccataagtagatccatgatcaccaggttttaaagcatctccgatttttttatttgctacaaacgctcccattgggaaaccagccccaattcctttagctagacaaacaatatcaggcatgattccatattggaaatatgtcatgatcgttcctgttcgtcccatcccacattgaacttcatcaagaatcattacaatctcatgcttatcacataattgtcgaattcccttcataaattcttgggtgcaaacatggatccccccttccccttgaacaggttctaaaataatcgcagctgttcttggggtgattaacttagccactgaatccaaatcattaatatcgccatattttacacccgtaattaatggtccaaatgcagtttgatatgcaggagttcctgttaatgtaaccgctcctgtagaacggccatgaaaagaatgattcaaactaataatttcactatcagcctttccatgtttttcataataatatttacgcgctaacttcaacgccccttcggtcgcttctgtcccactattagtaaaaaatacttgatcaagttgtgttgctttaattaccgcttcagcagcctcaattgtttcaacactattaaaataatttgatatgtgcattaaacggtgcatctgttgacacattgcatctgtatacagctgataatcatagccaaatgaattaacacctattccagaataaaaatccaaatactttttaccgtttgtatcatataaataaactccattaccgtgatcaaaagtaacatcaaatctaccataagctttcataaaagcattattagctctatcaaaataatccatttttagtcccccaatttaatcttatctgctagacgataatataattctactgcctgcatcaagacttcttcatcaaaattaaatgtttctgtgtgtaaaccgctaaaatattttggtgttttagttcctacataaaagaatattcctggtacctctttttgatagaaagaaaaatcttcagctaacattaacggctcttttaattcctcataattctcatcagttaatctaacaaattgccgatatagatcataatcatttaaaaccggtggatacattggcgggcaactaaattcaatggtacagccataagtttgctccatcccttgattaattgcctccatcgtatctgtaatttttttaaaaactgtctcgctgtaagttctaactgttcctttaaaagttgtttgatcagcaacgatatttcgcacagttcccccctgaatttctccaatattaattacgcagctttcaacaggtgctattactcgagaaataatactttgatattgacaaattatttgactagcaatcatgattgaatcaattcctaaatgatataaccctgcatgagcacttttgccagttattgtcacatcaagttcaccattttgagccatcaatggtcccggtcgacaagcaatctttcctgcttcgattgtcggcattaaatgtaaaccaaatattgctcttacattatactgctttaaaatcccagcttcaacaattaactttgcaccacctggtgattcttctgccggctgaaatatcaataagatattatgcttccactttaaaggctgctcttttagttttttagctaatccaagtaaagcagccatatgaccatcatgaccacatgcgtgcatataaccattatgacatgatgtaaaactacaattagtttgttcggatattttcaatgcatccatatcactacgaaaagccaaggttttatcttgatgattatcaagataaacaagaacccctgtatccaagattgaaattggttcatatcccatcttagttaattcatctttaagatattttgaagtcttaaattcttgtaaacctagctcagggatttgatgtaattcctgacgccatcttttaatttcatttaaagcgtccataactgatctcctaaatttttcttaaatcatccattaactgagttttaccttcagttgtttcatctttttgttctttaataattcgagctggatttccaactaccactgcccctgccggaacatcacttgtaacaatcgaaccagcaccaacaactgcacctttaccaatgtgtactccttcaataactacagcattagctccaatcaatacatcatcttctaatattactggtgaagcactaggtggttcaataactccagctaaaactgctccagcaccaacatgacaacgtttcccaacttctacacgaccacctaaaacagctcccatatcgatcatagttccttcaccaatcttgactccaatatttataactgcacccatcataattacagcattatcgccaatcgttacatgttcgcgaataaaacatccaggttcaatacgagcattaatattagtcatatctaacattggaattgcactattacgacgatcttgttctaaataagaatcaacaataacctctttatttacctccatataagctttaatagcctctaaatcaccaatacatactttactatcttctccaccaaacattttaaattcagttgcttctggtaagtttttcccttttaaataaacttttaccggtgtttgttttttagcatcaccaatatatttaattatctcttctgcactatttaacatatctatctccttttctatatctctattgttccattaaaaacatttgttgcaggtccagacatcatgatcgtttcatctacatattcaatttccaaacaaccacctaataattccactgttaccttactatccgtataatgatttaaatagcatgcatacataactgcacaagcaccagtaccacaagccatagtttcacccgaaccgcgttcccaaacacgcatcttaacataacttttgttaatgatttgaacaaattcagtattaacagatgcaggaaacaattgatggtgctcaaatttaggacctattgtttttaaatccaaagtatctaaatcagaaacaaaagtcacagtatgaggattccccattgaaatagtagttaaacgatattctcgcccaccaatttctaccggttcatcaatcattttctctttagcatatgtacaaggaatatcttgacaagttaggacgggtttgcccatattaacctttgctccaatacactcatcgccatcaaataataattctactgttcgtaatcctgatttagtttcaattttcaatacatgtttatcactcaatttatgatcatagataaatttagcaaaacagcggattccatttccacacatcattgcttcacttccatctagattaaacattcgcattttaaaatcatactgatccgatggtaaaatcacgatcattccatcacttccaataccgaaatgacgatcacttattttcatgataaattctttatccatgggaatctcctgatttattccatcaaagtaaatataatcattaccaatgccttccatttttgtaaaatgcagctgcataattcccctccttttcatgtatttacaagattttatcaaattgactaatatttttcaattccaagattatatttatttaaaaaagaacctttgcacattttaaaggttctcttcagccaatatttccattactttcaaatacgctccatcagcttcaaccggctgacaaattgtcccatattgatatagttcaggagccgcattttccatcacataaggatgccccaccatattaaaaatttccacatcattaaatccatcaccaaaaaaatatgtgttttctgtttcaatttctaagcgtgttaaaattgcctttagcccacttgctttagaatggtacttatttctaatttcaatcagatcataatcatcctcaaaagctaaattaaaacagccaaattgttcaataatctcattttgttttttcttttgacaatgaatatataatttaaatacctgatcatcatatttttcataattaattttgttcatatcaaagttagctttttttagaaatggtgcaattaccccatctttttgtaaataagccccatctttaaacaataaaccatactctaaagttaatgatcgtgctaatgaaatagttcgttcaacatcaccatgatctaaaggctctttaataatctcttcaccatttaaaataacatgcgctccatcacttaaaagatatccatcaaattcaaatcctcgaagaggtactgtgatcaaaggtaacaatcgtcctgaagcaatcattactaaaaaaccatgttcgcgtaatttttgaaaagcttcaaacatttgtttagttggcttatcgattccctggcgccagtcaattaatgttccatccatgtcaaataaaattaattttttctttttcattttatcaccagcgtcattataacagttatcttctcaataaggaattaacatttgtcatattatttcatgttaaatattaataaatcaaacatatattataatggtgatagtatgagatacatgtttaaacgagttaatcgcgtattaactattattctttcaactcttattttcatgataatttgttattggtggtaatagtgcatatttaatgctagtaaaaatagaaaccgttataatgatattgaggtgataaccatggaagacattaataacgttgcagttgaagttaaaaacggtgaaatggacgaagaagaaataattgcttatatcaaatacttagaaaaaaagtttcctgatgaaacacttaaatcattatcaattaaaattgacggtgatgaggttgatttagattatactttttatcctttgggttttgaaagaatccgtcgaatcactggatatttagtaggtactttagatcggttcaatgatgctaaagctgctgaagaaaaagatcgggtcaaacatgcataaaaaagcagctcaaatcgagctgcttttttaatctaattctaagccaccagtgtataactgataataagttcctttttctttaatcaatttatcatggtcaccacgttcaatgatccttccttgatcaagtaccatgatggcatcagaatttttaattgttgataaacgatgagcaataacaaaaactgttcgtccttccatcagtttatccattccactttgaacaatactttctgttctcgtatcaatacttgatgttgcttcatctaagatcaataccggtggattagcaaccgcagcccgagcaatagctagcagctgacattgtccttgtgataaacttgaaccatcaccactcaaaatagtttgatacccatgttctaaatgcataataaattcatgagcattggctagttttgcagcttctatacactcctcatcagtagcatcaagtttaccataacgaatattatccattactgtaccagtaaataaatgtgtatcttgcaaaacgattcctaacgatcttctcaaatctgcctttttaattaatttaatatcaattccatcataagttattgaacctttttgaatatcataaaaacggttgatcaaattcgtaatagttgttttaccagctcctgtagctccaacaaaagcaagcttttcaccaggtttagcaaataaattcatatcatacaaaattgttttattttcattatatccaaatgtaacatcatgaaaacgaacatcaccagctaaacggacatattcgattgaaccgtctggtcgcttatgctcccaagcccaaagtccagtacgttctttaactggagataatgtaccatcagcattttctttagcattaactaaagaaacatgaccaagatcatcttcaacctcttcatccattaatgcaaagattctttctgcacctgccaatgccatcaacaccatatttatttgttgagaaatttgtccaattggctgattaaaagagcggtttaattgtagaaaggcagctaatgtccctaccgttaaatccatatagccattaatcgcaagaacaccacctacaaccgcaactaacacataacttacgtatcctaagtttccaattaacggcattaaaatattagcatatttatttgcttgatatgcactttcaaataattcttcattgactttatcaaaatcaaatttagcttcttcttcatgagtgaagactttaacaactttttgtccttccatcatttcttcaataaaaccattaactttacctaaattagtttgttgagcaaagaaataccgcccactacgattagttacatgtttagaaactaataacattacacaaaccatcaaaacactaattatcgtcattggaatagacattacaatcattgaaacaagaacacaaacgatcgttgttgctgaaacaataacctgaggtacactttgcgaaatcatctgtcttaaagtatcagtatcattagtatagattgacatgatatccccatggttatgagtatcaaaataacgaatcggtaatttttccatatgttcaaacatcgtatcacgaatttcttttaacgatccctgagtcactttaattaagagcttattataactaaaagtagcaattactcctactgcataaattgcaatcattttcaaaatcgcattcgttaacggtccaaaatcaggatttgccatattaatatatggtgtaatataatcatcgattaagcttttgataaagattgttcccataacactagcaatactactaacaatgattaataacaatattgcaaagcaggtctttttatgtcttttaacaacaaatttaaacaatcttttcattgtttttccccgactattactcacttaaagttcctcccttcttttgtgtttcataaatttctttataaattgcactagactccaatagttcatcattagtacccatagcactgatctgaccatcatctaaaacaatgattaaatcagcatcttcaactgaactaattctttgagcaataattaattttgttgttccagggataacttttttaaacgcactacgaatcaatgcatctgttttagtatcaactgcactagttgaatcatctaaaattaaaattttgggtttctttagcaatgcacgagcaatacacaatctttgcttttgccccccagaaacattagttccgccttgttctatataggtatcatatttatctgggaaacgttgaataaactcatctgcctgagctaatttacaagcctccacaatttcttcatcactagcttctttattaccccagcgcaagttttctttaattgttccagaaaacaaaacatttttttgtaataccattgcaacttcatttcgcaatgtttccaaatcgtattttctaacatctttaccgccaactaaaacttctcctttagttacatcatataaccgtggaataagctgaacaaaagttgatttagcactaccggttccaccaataatcccgattgtttgtccagatttaatatgaacattgatatcacgtaaattaatttcttcttgatcatcaaaatatgagaaattaacattattaaaatcaattgaaccatctttaatttcataatcaggctcagcaggattatgcagcgttgatttttcattgattacttcactaatacgttgggctgaagcaattgacataactaccatgacaaataccattgaaaacatcattaaactcattaaaatcatcattacataggtaaataaactagttaattctccagtagtaagatttcccccgacaattaagtgtgctccaaaccaagaaattccaataatacatccatatacagttaactgcattagcggcatattaaaaactaaatagttttctgcctttacaaatagtttataaatcaaagttgatgtctttttaaatttctcgtcttcatgttcttcacgaacataagctttaacaacccgaattccattaacattttcttgaactgaagcgtttaaatcatcatatgtgttgaatactcttttaaaatacggatgagctctagtcataaagaaaactaaaagaactcctaaaaagataattgccactaaaaaaaccatagcaatctgagcattgatcgtaaaagccatgatcatggcactaaccatcatcaatggggcacggatacaagctcttattaacatttgaaaagcattttggacattagtaacatccgtcatcattcttgtaaccaatccagcagttgaatatttatcaatattagcaaaagaaaaatcttgaatattgtaatacattgcctttcttagatttttagcaaaacctgttgaggccttagcggcatatttaccagccaaacctcctgccgctaaagaaataaaggaagcgagcaatgtaatgattcctaatttaacaaccatattcatatctctaacttctattcccttatcaatgatcatcgccattaaaagtggaattacaacttccaaaataacttcaaccacaacaagtacaggtgttaagatcgtatcttttttatactcttttatttgggctaaaagtgtttttaacatttatatacctccctaaaaattaaatagcgtgctatgaataacagtaaaataaatattaagaattacttcttaatatcttaatcaaataactttgtaaattgtctatttcttcttttgataatgattcaactaatttttcatcagactgttggaaaacaatccgtagctgtttatccagttctaaggccttttcagttacttcaatatttttagcacgagcatcatgacgacacggtacccgggtaattaatccctttacttctaaacgattcaaaattccagtaactgtaggattagaaatatctaattctttttcaatatctttttgattcacactaattcctttgtcgtgagatttaaacaaataaattaatgtaaatgtctgtgaagcagttaatccaaatttactaaattgtttatttaaatgctgttcatgtaaataaaaaacttgtttgattaaaaatccaatttttttatttggcattttaccacctccaaaataaatagcacgctatatattatatgcaaatattagcaaatgtcaactatctttcaataattatttatcatctttataagagctgataaacgataaaaagctaagaatcatcttagctttcttcatcctcttttccccattgttcaatccataatttagatgaacgagacatttcttcaataaatggatcagtccatttgcgattataaatatcatcgacaaaacttcgtcccccactgctgcgattagctaaaactgctcgatcatcaaacatttttactaacttttcatcatcaaatttttcataacgatcaacactaacaacatatttagaatcaaaacgagcaggcttagttcgatgttgctgctgttctgtcggataacccattacaagcatccccactggagctgtatattgaggtaaatttaataattcacgatgtacttcatactgctcaatgatatcaccgataaaacaacttcctattcctaaactttcagctgcaacaacggcattttgagctgcaatcaaagtatcactaaatgctaataaaaaatcaccatatgatggcgaacgcatctgttcttcaccatgataatatttaaatgcatcataccatttttgataatcagcaacaaagattaaaactaggggtgcttttgcaataaacggctgattatcacacgtcttcgctaatttttctttaatagcctgatcttgtatatcaataatcgaatataatgtcatattccctgcagtcggagcctgaatggctgcattaaaaattaattgtttttctttagcctcaattggtttatcttgatatacacgaaccgatttacgctcaaataactgcttaattgtattattcataattttcctcctgaaatccctattgtctatattatacacaaaagaaaagtagatacctagtatctacttgttattttctttatattctaaatattcatcatatgttgataaacgatctaaaataccattttcattaaattcaataattcgatcagcaattgtttgaacaaactgatggtcatggctggtaaataaaatattctccttaaaattaataagtccttggtttagggcttgaattgattccaaatcaaggtgattagttggttcatctaaaactaaaacattagcttcggccatcatcatcttagccagcatacaacgaaccttttcgcctcctgataataccgaagctttttttagcgcttcttcaccagaaaacaacattcttcctagccagccccgaagatcttgctcatattcatctttaaccgagaattgacgcaaccagtctactaaagttaaatcacagttattaaaaaactcggaattatctttaggaaaatatgattgtgacgtcgttactccccattggaaagttccttcatccggttcaatttcacccataatgattttaaagaatgtctctgttgctttaacatcgccgacgaaagctactttttctttaggattaattgagaaactaacattatttaataatttaataccatcaactgtttttgataatccttctacttttaaaacaatatttccaacttctcgacctggtttaaaagcgataaacggataacgacgaagagaaggcttaatatcaaccatttctaagttatctaataatttttttcttgaagttgcctgcttagctttagaagcattagcactgaaccgcgcaatgaattcttccaattcttttttcttagcttctgcctttttatttacttctttagcttgttgtaattgtaattggctatattcataccaaaaatcgtaattaccaacatataattgaattcgcgagtaatcaatatcagcaatatgtgtacaaactttgtttaagaaataacggtcatggctgacaacaataacagtatttttaaaattcaataagaagttttctaaccagcgaatactgtctagatcaaggtggttagttggttcatctaataataaaacatcaggattcccaaataatgcctgagcaagcaaaacttttactttttggtttccatctaattctttcatttttaaattatgtaactcttcaccaatccctaaaccattaagcatgatttctgcatctacttcggcattccatccatccatttctgcgaattcaccttcaagttcagctaacttgattccgtcttcatcattgaaatcaggtttagaatataatacttctttttcttgcataatttcataaagacgtttattacccatgataacagtttctacaacaccattttcatcataagcaaaatgatcttgcttcaagaccgataaacgtttatgtggttctaaaattacttcacctttattaggctcaatttctccagctaaaatttttaaaaaagtactcttaccagctccattagcaccgatgattccataacaattaccatcagtgaatttaacacttacattttcaaacaaggcacgatcaccatattgtaaagatacattttgtgtagatatcattaattaaactcctttttactaagtcacattattatgtcataaagcaatgattaaatcaatataatttatcataagattgttcaaatcaagctaattataacaatattagtatctatcttcatcattatttattttccataacaaaaaataatttaaatctcccatctaaaatcaatatcaatattttaatgatgtaaaaaaagccgagctaataaaatcctttgcccaactgaatttattacaacgaaaatcgaacaaataatagaatagaagaataaattcagtgatctattgtccctcccattgaaccgtatgtacgggtctcgtatacggctctacatttatatcgctatcacaaactcttaagatagtaatcgaggggattgactaaacctagtttgtctcttttctttatacctaaaacttttgatgatattgtaaaatttacgacattcatcgcacttcttctataccatcctaatcttgtattcacacatttatatatttcttcttcactaaacccgcatcgacatgccttgtttagcttcattaaatttctattcgtaacctcgaagattttgttacactacttctttcacccataacatcgctgttaatgacttgcggttcactatacttggcggtaaatacccgtggttggactttcaccaactagatgtatgccatgcgcggcacacttaaaaaaaacaatacaatgaagtatctcattgtattgttttaatttactttttattgcatttaccatttctaaatgctggattataggcatagtaattatcactgtttaaatgccctttaacgatctccaacgcttcagcaaatctttgataatgaataatttcacgttctcttaagaaacgaatcggtttttttatttcctcgtcatcaacaagagctaaaatgttatcataagttgtacgtgctttttgctctgccgccatgtcctccgttaaatcagtaattgaatcgcctttagattggaaataggccgctgtaaaaggtacattacttgcaccttgtggataaattcccaaagtatgatcaacaaaatatttatcataaccttgtgcttttatttgatcaattgttaaatctgtagttaattgatataaaatggcactgatcatttcaacatgggctaattcttcagtaccaatatctgtcaataacgcttgaatttctggatatggcattgtatagcgttgagataaatatctaagtgccgctccaagctctccatcaggtccgcctaattggtcaataataactgccgctgcttttgcattcggtttagtaatgtttatagggtattgcaaacgtttttcgtacaaccacatttatgatcacctacccatggccaaggtgcagataagtaatcgttttggtaagctccaacttctcgatttactaaagcatgaccttgtttttgatattctttttttgctgcttttaaacgtgttgctgcctcattaaaataattcatcgcttctttatcacagggatgagtatcaataaataatgcagaatcttgcactgcaaaatccaacatcatgatttgcattaatagatcatcatttttcatcggcataactcaccccatggcaaatctaactcttcaaagatagttccagagtgaaaagctttaacaattggatatatctttctaaattcttggcattttattgatgaaatacctaactctaatttattcattaaattcctccttctactctaaattatgaatattgaaataattcgtataggttaacatcacaagaaacttatttataatatttattaattttttatttacaagattttacaattatgttattattaattggcagttggaaatagaggtatagttcaatggtagaataccggtctccaaaaccgttgatgtgggttcgactcctactacctctgccagtaaacaaataagtggctaattaagccacttttttatttattaaaaagaattatctggaaattttatcatcactttttcaatcaataactttatcaacaactgtttgaagtaatgaatcattttaagataaatagtactttagaatctcatcgattttggtatcttctttttttactattaataatatttgtttatttttaattgctacaaatgtattatcaaaataatagcatttatcagcatactcagtttgaatatacttaaatttttttatcgcttgtaaataatttaaatattttacatcattagtagaccattcccctgtcgtttcaacaattgcatcaatttctatttcatcaggaatcctgctatctcgctccacaccacaaactatttcttcaaataccttatttgcaatataattatttaaacattcatatttactttctaaaaaaatcaattgctctccttcataagaagtattaacataattactaactaaaatcgaccgcgttgaagtgctctcaacgtttattcccttttgtaaaggctgaatagttttaatattaatatcaaaatcaatattttgcattgcaatcacaaatactacaactaataccattgcaacagcagtcttccctcgtctaagtgtactattaatttcatggtaagctttcttattgatataataattatatatttcaaaaccaccaattactattatcaggccgatcaaaacaaacaggttatatactacaatatcaattatcactaaagttaagataaataatagaatcagcccaattaacttttcaattataaaacatagttttatccatttttttaacgattttttattttcttgttggcgattgatacttagcttcatcaagaatagtgcaataccatcgataacaaacattaaagctataaagatatataaataatgaccgaaaaacagctttgtattaagaaagaaactgccaagagtatatcgaattaccaataaattcattttccatatacttgagtttataatcaataatattaatgcacatccaattattaaaaaaacatggaaatatttatatatgttgcctaatgccattagccttgctgcttcatctgtatgtagattcgctgcattaatatcttcattataaaagaatgaaatttctctataattgtcaacaaagcgatagccttctaaagtgatcatttcaagataatcaggtgttaaaagattataatccatttgatatttaacttttctgggcgaccgccgttcaaatttaaaaaaagttgttcccactttcactaaataccagccatcttgtgccattttttctaaataggtaatacattcatcttcataaagtaacaaatcattgagcaatctatatttaaccttcactatgttctcccactttccataatttaaaataaaatttccccatgtaatttttattaaaaaaagccattaaataaattaacaattgccaatatcaatacgcaaatcaactaccgctaaatcttcggtataaaaattgtgatacatttataaatatctataaacatataccagttatcaaatctttatattcatcactatgcaggtgataatcaacttgatattttaaattctgagatttttcccttacaaaaataaaatttaatagttcttaaaatccagccatttcttgcctaataaatttaattgacttagatattcctcctcatctataaacagcatatcatatctttttattttaatttttatcttgatttacctcattcaaagcttttatctgcatttccagtttccgcttttcctcttgcagtttatatttacctatttttgtaatctggtaaattttttttcgatcaatctcacttactaattcaatataaccatcattttgaaaccgcgataagagagtatataaagttcctgctcctacccttatctcatcatttgtaattcgcataatttcattcataatttcatagccgtgtcgaggaacattcaatactactaaaatatagaacatttgaggcgtgagtgtctcaaactcttttcttgccatttttaccacccttatatcgattatcgatactcttcttacttttattatacactaactatgttgataatcaatatagttaactaaaaaaagaatcccaaaggattcttattcatcacaatacaaatgcattggatatgatagatattctaattcatctaatttttcaactgtcatatatcctggtggcgctaataaaatagatgggatacgattaactacggttgcacatgtatgttcaactgtcgcaggtttttgaacatagaaacttacatcaggttcacctttaattttccagtcgcacatatcaccatcatcaggtccatagactttaccaatacattgagtttcaatgattggtccttggaaagtttctgttgtaactaccgcagacattccgatacaatttcctttcggaattgtttcacccaatgtttctgaatataaatcagtatcataaaaatatggtacacatttttgtgtttgcgatttgattgtccatcccattttattgcacaacgcttcatttgaattccatacataagctggttctaatgtctcaggatgagcaagttctttttcaaattgttcaggactaaatccagctccatgagctttagcaagtgctaaaccataatcttcaacattataagaaactgcaccctcaattttatcaatacgttgacatccagcagcaactgttccaatcatattgatccagtatatatcctgcattcctgaaccaacgattgtgcaccctgtttctttagctaattcatctaatttattagtaagttttgatgaagtagtccatggataaattgcctcttcacatgttgttacaacatttattccacggcgaacacatttttcaaaatgaggatagcaatcttccataaaactaaataatgtgactactgcaatatctggatcacattcatctaacacagcatctgcatcatcactgatcgttacccctagattaaatcctaattctgcaaattcaccaatatccttgcctacaacatcaggatttacatcgatagcaccaacaatatcagcacctttttcatatagataacggattatatattttgccatttttccgcatccatactgtacaactctaattttttctttattcatcttgattacctccatatactctaagtataaactttattgttaccataaggtcaagaatttgtgaaataattatcaaatttttattggaacttgtaaccttaaatacatatttctttgtttatcgttaaatatcaaaatatcattcaaactttcgcatagataatccccgactattgtataatttttagattcaatttcatcaaaaagacgatgtgcatattccttttctttagtaaaatcatcacaataaatacatagatacatattagctggaattgtttctttttttaacggaatttcttttttatcatcaataaaaacaaaaatttcagttgcacaaaattttcttttcaaaacatattccttacgcaaaatagttcctggattaaaaaagattgttggaggtaaagcttgtttaatgagatcatctttaaattcccttaataattcttcataaacatctagatcataatcataaaaatttactttttcatcaacatagagcatcgttcttttatttataaattctaatgtgatcattccaacttttggggcagctttaaaaagttcaaatgaatcaattgttttttgaattgctgctttttgctcatttaattgaataatttgattgttaatctgtagcttactttcttctagtttttcctgtaataattctaaattttttgaatcaaaaatttctttgatttcttttaaagtcattcccaaattctttaaatactgaattatgtcaagtcgtgcagactgaccaatatcatagagtcgatatccgttatgttcatctacataagctggtttaaataaacccattttgtcatataatcttagggtttgttcagttacgttatttaattttgccattttccctattgtataacgtttcatttaaatcacccataaacattataccaagaataaggttttttggtaattgagatgataatatttcgtttacaaatttctattccatgatagaatagaagaaggtttaaggagacgtatatgttaataagtgcaaataatttatcaaaaacgaatggtattaaaaatattgttgataatgttactttttcaattgaagaaaccgataaagttgctttgattggagttaatggtacggggaaaagtaccttgttgaaagtcattgcgggaaatgaaaattatcagggagatattattagaaaaaaagatatgacaatctcatacttaccacaaaaccctgattttgatcctaataacagcgttattaaacaagtttataaattaattgatgccagcgaagttaatgaatatgaaatcaaagcaattttaaataagtttggaattactaattatgaacagttaattaaagaattatcaggtggtcagcaaaagcgtattgcccttgcaatcaccttgctaaaaccatgtgatctcttaattctcgatgaaccaactaatcatctagataacgaaatgattgaatatttagaaaaatatttaattaagttcaacaaagccattctaatggttacccatgatcgttattttcttgaacgagttaccaataagatcatggaaattgatcgtagcaaaatttatgaatacactgctaactattcaaaattccttgatttaaaagcacaacgcgaagaagctgatctagcttcccaaagaaaaagaaaattattcttaaaaaaagaattagagtgggttagagctggagttcaggctagaactactaaaagcaaagagagacttcaacgatttgaacagctcaacaatatttctgatattcaaactattaatcaagtagaattaatcaatactgcttctagacttggtaaaaagacaattgagttgaaagatttgagtatgtgctacgatgatcataccttgtttaacaacttttcttacttatttaaacgaacagatcgaattggaatcctcggaataaatggttgtggtaaaagcacccttctaaagattatcgctaaagagttagaaccaagcagtggatcagttactcatggagatacaattaaaatcggatattttaaacagatgaatgatggtcttgatgaaaatatgcgcgtgattgactatatcaaacaaacaagtaatgatttaaaaacccttgaaggcagctttactgctaaacaaatgtgtgaacgtttcctttttgattcaagtttacaacatacttatattgctcgtttatcaggtggagaaaaacgtcgtctatatttgttgaatattttgatgcaagctcccaatgtactattgtttgatgagccaactaacgatttagatatttccactttagctattcttgaagattatcttgatagttttaatggcatagtcattaccgtatctcatgatcgttattttcttgatcgtatttgtgatggcttattcgtttttaagaatcaacaaatcacttattgtaatggtggctatagcagttatatcgatatttctgaacaacaaaataagaataaaagcgacggagctttaaaatataaagaacagaaaaaacttcaaagtgctattcgcttaagttttaaagaaaaacaagaacttgaaaatatggaaaaggttattcttgagtttgaacaacaaatcaaaattattaatgaacaaatgaatgagtatcaaagtaattataataaattgtcagaattatcaaatcagcgtgactatttaaatgaacaacttgagattaaaaatgaacgctggttagagctattagaaaaacaagaacaaagtcaaaaataaaatagcgccttatgcgctattttatttatattgatttaaaaaaattatgataacatcaaagaccgctctaacataaaaaattgaacgctcatgatcagctttagcaactttgcataaagttgcattataaccatactctttttatttttgatataattctactgattgttcaaaaggaacaacatgatccttagaaccatgcagaataagaattggtagcaaattcattttcgcttcaagataagataccggtgatgcttcacgatagagaacttcatcatcctcgcaccagcaccccaacaaatcataaatatttgtcatttctttttcattatatttactaaaaccttgattgaaagttaaaaagttagtcacaccatataaatcgatcattccctcaacatcttggggatattctggaaaagtttgataactataatttttaacttttataattaaactttcttgatctctagtacttctaaatgtaaatcgtattcatctaaatacagcccacgatcttcaaactcagcctcaccagtttgattatcatatggatcttgacgaataaattgtttcggtggataaagatcgtattgatattcactatttgcaggcattctaaacggatcaaggtgtccaaaataatactgccatcgttcctgatcaccattacgataagcagaacctccaaaagaacaatcagcatataaccagccatatggagcaatataaaatcttgcccaatcatgattaccgatatcctgtggagttacatataaacctgcttgccaacgggcaggaatccccacgcaacgacataaagtaataaataatagtgcttgaacaccacaatcaccttttccacctaaagcagcatactcaggaatattgggaattgtgtaataattccgaacaaatgaataggttatgtgagttgtaatatactcatatattaatttagctttaattaaattatttgtctcgtctttaactatttcttttgccaaagactttaaataaggggtaaaaacaatatgcggtgcttgttcatgtaaataaaaattaggttgactttctaaaacatcttcgggtttaagttctacatatttcatctcattatcatattcatactccacataaaaatctttaacctgatcaatattttcttcaaaatagatagttcgctgtggatgacttccgtcatttaaatatttgtattgcggcattgtcgcaattaatttaaaattcttaacttgacaatcttctaacggcaaaggaagatgaattttaatttttttatttgaatctgatgccttgatcttaattcccgtctttaaacgaaaatgatatgttaattgtccctttgttttaatttcatgtattgcattattaagcagtgcaaaatttgcttcacgactttcaactttgcttttatcaaacaaacgtgcagcataatcatttctagtctttaaaatgttatcaaaaaaatcagctctaaagtatggttgtccttctacaaaaatccattctaccgcattttcatcttgtaatttttctagttcctcatcactaaaatcattaaaattattatgacaaatttttaaagcttcttcatatgataacggatattcttgaggtattctacgaataatttctttttcatgaagcagtcgtttttttaaagctattggaatatcattagctaattttgcatcaattattcttttcattcttgtaaaactaccatgccattttaattttaataattcctctggcaacggaatttgtaaatactgtaagtcatcaaaattataatttcccattattctttcctttctttacatataccaggtgataatatcatcagaacgctcatagcctaatttttcatgtagtcgcattgatggataattatctacttctacttgtaaataaataatttcgttttcagcaattagtttttgcattaaatactgttctagagcctgagctgttccaagacgtcgatattctttaattacttcaacaaaaccaattgttccctctatatgacgcccagcaaatccaacaatctgcttttcaataaacgcacccacaaatacattagcatcaattcgttcaagcaaatatgcttcttcaatcggagtagaataattttctttaataaattcaaaatattccctcccaatttctttaatttcaacgattgggttattaattattctaacatatttttttaaatagccatactggtaagctacaatttctttatttaatctccatttttgattaattatattaaaatatttatcattgtgaattgctagcattgagcacttatctatttgtttaagtaattgttcagcaattttttcatctttgaatgcaagcatatagatatcctcaaatttaagcattattcctgcctgattataatattttatcttagcaccatgttcaagagcatatattaaatctaaattattaagataatcttgtttaagaaattttaatatctcatttttcatcattcctactcctattaaaaaaacaggcactgcctgtttttagaattttaagaatcgtctaattgaaacaaagcttccaaccaaaccaacgccagcccctacagcagcaataactagtgagaaatcgcggataaatggcattggtggttttagtgctaacattgctgacattaatgcaccattagcgtaatcatataccattccataaccataaactaaaacaataatcgggataattgatccaattagaccaatcaacattccttcaagcataaaaggaatacggatataccagttactagcaccgaccatacgcataatactgatttcagtttgacgcgctgtgatcgtgattttaattgtattagcaatcataaataatgcaataatggcaagtccgacaataaaaatcgatcctccagtttgaatagttttcaacgtttttaccatatcttgtgttgattgtccaccataacttgttttattgacatttggtatttcttgaatcttttcagcgattttagcaatatttgctgcatcatcaacttctacttcataagccccacctaatgggttatctgctcggtatgattcaaataaagcagcaccttcatcaccttgagtttcaattaatttatctaattcttgatctttagtataataagtaatcttttttactccagaaatagcttctatttgtggcccaactgcttgttcagcagcttcgtctatatatctatctaattttacataaatactaactccctcttcaatgttcgaactaatatcttgaacatttaaagctaaaacaccaattacaccaattaaaacaagcgtaatcgtaacagcgaaaattgatgaaaatgacattacaccattacgccatatattttgaactgccgttttaaaatgtttaggcagatttttcatacaactaatcaactcgttcattaaatatcgtaacctcctaaactagtgtccgcattaacacatccattttcaatcaaaatagttctctttttatgttcttgaacaattttactgtcatgagtaactactagaatagtagtattctgttgttcattaattctctctaaaagattaataatttcttcagatgtttctggatctaagtttcctgttggctcatcagcaattagcacttttggtttgttgacaattgcacgagcaattgctacacgctgctgttgaccacctgaaagttcatgtggaaaagcattgactttatcctcaagtcctactaactctaaagtggctctaacgcgacgacggatttctacacgtggagtatcaattacttctaacgcgaacgcaacattttcgaaaactgtcttttttggtagaagtctaaaattttgaaatacaaccccgatattacgacgaaaataaggaacttttcgatttttaatttttgatacatcgcgccctacaacctctactttccctgaagttgctttttcttcgcgatataaaagctttataaatgttgatttaccagcaccagtagtaccaataacataaacaaattcacctggttcaatcgtaagattcatatcatttaaagctcttacaccagttttatagattttcgttacatttgtaagttttatcatatttattgccgtattcgactaacccctttctattattatatttatatatattcaattttattatattcaattttcctagagtccgattttactccacgcatattatagcatactttatcgaataaaggcacaaatactattattatatcgcaattttatgatacaataaattaaagaggtgacagtatgaaaaaagtgtgcccggtttgtcaaaccacgcttaaaactaactgctttattaaggataatggcatttctacacttagctatttagaacttattattaaagatgatgatttcaaaaaaactaattatgaattgaaaagctgctattgtcctaactgcggtcatgttgaattttttgttgatttaaataatcctgaaaaaaataaaaatgattgatcacaaaaagtacaacaaaaaaaagaaatcttatgatttctttttttataaatcaattggtggcaacgtgaaaccacgcccccttacactatgagtagcattactaataataaatgcagttggatcaatcgctaaaatcatgtcatttaataaatgcagctcacgtttcgacacaacagccattaccgcatattgatttttctgatgatatccagttgtaacatttaataatgtacagccacgattaatatcctcaaaaacaatttttcggatttcctgccatttaggagaaataacagttacttgtactttagtttcccccaacatcataacttgatccatcacaatcgttgtaataatcactactgtaattccatataaaacctgttcaattgtaattggacaaaaaatcacctgaaaaagcaaaattgcacagtcaaatatattaatcagccaggcaactgaaaagccggtttttttattaacaatcaatggaggaatgtccattcccccggtactggctccaactcttaaaactagtcctaaccctaagccaatacataatccggcatatagagttgataataaagcatcactagtaatcgttgataaagcaggtacgcattctaaaattgctaaaaaagttggatataaaaatgtacttaacaaggttccagctgcaaactttttaccaaagtaaaaataaccaacaacaaacattacaatatttattgcatacacagtataggaaatatttattcctgtcaatgatttgacagcaatcccgatacctgaagcaccacctgtaatcaacccaaccggggtaataaaagcacagattcctaacgctaaaataaaattaccgacaataataatcagtgtttcataaatatgcttcttcacgatgtcgtcctccttacaatgctgattttaaataggcatatataaatccatcaagatccccatctaaaacagctttgggattattagattcatatccactacgattatctttcactagcgaatacggatgaagtacatatgatctaatttgtgaaccccatgctatttctttttgctctccttttaattcttttaattcactagcttgtttttccagcatcaactgatataacttgctttttaacattaccattgcttgttcacggttttgaatttgacttcgctggctttgacaggttacaacaatattagtaggtaaatgtgtaattcgaactgctgaatcagttttgttgatgtgttgaccaccggctccactagctcgataagtatctattttcaagtcagtactttgaatctcaatttcaatctcgttattaaattcgggcattacatcaaccgatgcgaacgaagtatgacggcgttttgctgaatcaaaaggtgataagcgcactaaacgatgaactcccttttctgcctttaaatgtccatatacattatccccttttattaacattgtaaccgattttattcctgccacatcaccatctaaataatctaaaacctcgactttccagcctttattagcagcataacgttgatacatcctaaataacatttctgcccagtcttgactctctgttccacctgctccaggatgaatttcaacgattgcgtttaaatcgtcatgttcaccagacaataacatcattgtctcaaattttgataattctttttcaaaaacagtataatcactttcaagaatttccttaaattcttgatcctcagtattctttacaagctcatatgtttcatctaaactagttaatgtcgtttctaataaatcatattgatcagttgtttttttcatcttatttaacttatcataagtcactttagctttattagcatcatcccaaaatccctcttgtagtgtgattacggtgagcccctcaatctctcgacgatatgcttcaatatcaattgattgataaaactccgtcattaataaatgggctttagtaagcccatttttaatttcgtataattccattacttaaatgtaagttccatctttagatgagggatagtttgttctacttcactaccaggacggattcccatatggacaatattacgagaaattgcatctgcaatacttgatgtcatttgttcaaacatgtagaaagcttcttctgtatattcagctaaaggatctttttgcgcataagctcttaaataaataccattacgtaatttagtcatagcatcaatatgattgatccaagtatagtcaattactcctaaaagaatacttctttcatattgtaatttcttttctggctctaactctttattaaaacgactaatatactgattgaaaactaaatccgttaatgtttcaattaatttttgtggatctttttgtaatgcttcacagttactagcttctacttcaactaataacatatagtttttagcaacaaaatcaacaactccagcaacatctacaatatcatcttttccatcatgttttgtaaattggcggacagtcatttctattgcttgattaaacattcctttaacgatagcatccaaattttcttcagacataatatcatcacgctctttatacatgatttcacgttgttgacgcattacatcatcatactcaagaatatgtttacgagaatcgaagttttgaccttcaacacgtttttgagcaccttcaattgctttagtaaccattttattttcaattgcttgatcatcttctaaataatctgtaaatgattttaatctttctccagcgaaacgttccattaaatcatcttcaaatgatacatagaaaaccgaataaccaggatctccttgacgaccagaacgtcctcgcaactgattatcaatacggcgagattcatggcgttctgaaccaattactgctaaaccgccaatttcagcaacaccttcacctaatttaatatcggtaccgcgaccagccatgttggtggcgatcgttaccgctccacgttgtccagctttttcaataatttcagcttctttagcatgatttttagcgttcaaaacgttatgtcttattttacgacgatctaacatttttgataatacttcagatgtttcaacagaaacagtcccaatcaaaatcggttgaccatatgaattacgagcttctacttcttcacataaagctttgaatttattagctctagtagaataaatcttatcattgcgatcatcacgaataactggacggttagttggaatctcaataacacgcatattataaatcaatctaaattcttcttcttcagttttagctgttcctgtcatccctgctaatttattaaataatctaaagaaattttgataagtaattgttgctctagtttctgtttcttctttaattggaacaccttctttagcttcgattgcttgatgtaatccatcagaataagcacgaccaggcataacacgacctgtaaattggtcaataatcataatttttgcattacgaatatcacgagtaccatcttctgtagcaaccatatattcaacatcgcgagtcattgtatagttagctttcaaagcttgattaatatgatgcactaatgcagtatgttgtggatcatataggttatccaacttaaaacctttttcagctttagcaattccatcaggtgttaaagcaaccgtcttactttcgatatcaacttcataatctttatcttgtttcaaagatttaacaaaacggtcagcttgtaaatataacgctgctgtatttttacgaccaccagaaataattaatggtgttcttgattcatcgattaaaattgaatcgacctcatcgacaagggcataatttaacccttttactaatactttatcctctaaacgagttaccatgttatctcttaaataatcaaatcctaattcggcattggttgtatacgtaacatcacacccatgagcttcttgtttttgttcaggtgttagctcccgtttattcaatccaactgttaatcccaaaaagttaaatactttgccattatttacagcatcacgtcctgctaagtaatcattaacagtaacaacgtgaacaccattaccagttaaagcatttaaatatactggaaaaatcgaagttaatgttttaccttcaccagtcttcatctctgcaatatcaccttcatgtaatgtgataccacccatcaactgtactttgaaagcttttaggcctaattgacgataagcagcttcacgaactgtagcataggcatcaataattatgtcatcaagcgttttaccattagctagagcctctttgaaaatactagtttgacccgctaattcttcatcactcatcgctgcatattttgattctaaagcaattacttcgtcagccattttatctaatttttttaattgttttcgttcatcgtcaaaaacacctttaattctcccaataaagcttttttttgttgaatgtggtgttgtattaaatggaattacttcaccattatagattccttggaaatcttcaacctttatatcttcaccggtttgatcttgcaaatcaacgatatttgttactgcttcaggatttaatccctctttttcatttttcttttttaactcttttcttatttgctcttttctactagccatgaaatacgctcctctttaataggtttagtctaccgtattataacatttaaatatattattttaaagtccaaattaaaagacaaggttttatcccttgtcttagattttaacaacatgttttgcttgcatcccacggtcactttgataaagctcaaattctactagttcaccttcatttaaagtcttatacccatcttgagttatttgactataatgaacaaatacatctttgccttcaccacgatcaatgaatccaaaacctttttctgcgttaaaccatttcacttttccttgcatctcattcacccctttaataatatggtcaatgttagtatattattattgttttcaaagatgaattcatttcactcgacaaagtttgccaatataagaattttgttctattttgatagaactgttgtcgcgtcaagtataaattcggtaatcaaagtcgatatatgctctattttcatttaaaaaaaataaaactttcttgaaacaaatttagcatcaagttgagacccttttattagcatcttgagttacaatataagtgggtgatataagatgatttgtccacgatgtaagaatcaagattcacaatatttttatactttcaaaaatattacttattgccgtaagtgcgttaagatcggttcaacttgtttttctccttcacagttaccttctattattaagacagttgattatcagctcgactacgaattaacaccattacaaaataatatttccagacaattacttcaacgttatcaacagcatctcaacacttcccttaaagcggtttgtggtgccggtaaaacagaaataacttatgaggtcattaaatatgcactaaaccaggggcagcgagtctgctttactacaccgcgaaaagaactagtaattgaattagcaaagcgattgcaaagtcaattcaaaaatatttcaataactactgtttatggcggtcatagtgaattggtagatgggcaatttattatttgtactactcatcagttatatcgctatccccaatattttgacttattaattttagacgaattggatgctttcccttacgtaaataacgaagtcttaattggtctactccaaaacagcattaaaggcaactatatttatatgtctgcaactctaaccaatcaaccagatttattaatgaccaaacgatatcatggttatcttctagatgttcccaagtgctatctaacttcatctttggtaatgtatctttgggcaattaaaaaaattagagattttgtcagaaagaaaaaacccgtacttgtttatgttcccaccatacaattaacaaatacagttgcccgcatctttaaactgtttaaacttaaaagtcatgctatcagctctaacactaaagatattcaaaaatttatagaacgtcttagacatcatcaattagatgttttagttacaacgactattttagagcgcggcatcaccatcgataatgttcaagtaattattttatacggcaataatcggatatatacaactgctacattgattcaaatatgtggacgagtaggtcgtaaaacagcacatcccagtggaagtattagtatttttactccatacaagaccagggcaattaaagagtgtctcaaaacaatcaagcaggacaatgcttaatctgttttaatgatctcaataaatcacctagcttatatcatctttattatcatgctacactatgttttcattgtcttaaccaattttcaatctataatcgaactcatgactatcatggttacaaacttacgattttatattactataacgatttctttaaacaattgttattccaatataaaggacaaggtgattatgctttaaaagatgcttttttgaatgcatatcctcattttaaaaccaaatatcggcgtcatctcatcgcgcttgttcccagcagccaacaagacgatctaagacgaggttttaacccaaatgaaatgattgtaagaagttttagtaatcatatttttactggtttatacaaaaattccgcctataaacagaccagccaaactgatcgcagtcaagtaagtcagattatcaagattaaagatggtcagcggttatataatcaaaatgtgataatttttgatgatgttattacctcaggcaatactatcatgacttgtgcaaaagttatcagttcctatcagcccaaaacaattagtataatcgttatggcaagtaatcaattagataaattatttaaataaatattacacactaaaacttgtgttttaccactaataatatcgttttaaataaccattaaatatagtgtaacgtaaatacttttctacttaaagggcaagaatttaatttcttgcccttttattccttattttttaatcatatttatctttaagcaaaaaaagtggctgcccacttatttttcttctaatgcctttttataattatccaaatccaacttaatcttctttaacgtattaaagacccagtcaactcgatcgtcaggaattgctgatttgtataaatctgccaattcatgatggaactgttcatgaatagccaatgcttcatgtcccttatccgttaactttagataataaactcgttggtctttacttgatctctctttaactaaaaaacctttttcaactattttctttactgctgttgtcaatgttcccatcgttacacttaatgacttagccacattagtcattgaaggaaattctaccttatccactgcatcaaggacatgagtttcactcatcgataattccttaaatttgctcttcttgaggtacaattcttgtataaccattgcttcattaaaaacatcaactactgtctcgattgcatctgagcgtttgtccattcctatcacctccttaattgtacaatattttgtcaataattgaaacatttattgtttctgcttcaaaacaacctttgaattttactactaatcgttctataatgtcctaggaatggggagtagatatgaaaaatagattaattaaaacattaaatatcaaaagatttaaattagtattattactagaaggtttgctggtcggaatattagcgggattagtaattgttggatatcgaatttgtttaactaatggagctctttggttacagcgaattttagcctattgtaaacaatcaatattcacaataattatctggtttgttatcctatttgtgatagcactagttgtcacaaaattactcgattgggaatcattaatttctggaagcgggattccacaacttgaaggagaattggcaggtaagattgatgccaaatggtggcgagttttgattgctaaattttttggtggtttcttagctaatttttctggtttagcccttggtcgtgaaggtccttcaattcaattaggggcaatggttggtaaaggaattggtaaagttttaaaacgtggtaagactgaggaacgctatttacttacttgtggtgccagtgccggattagcagctgcttttcatgccccgctggcaggagtaatgtttgcccttgaagaagtacataaacatttttctgccccactattgatttcagtgatgacctcatcaattgccgccgattatcttatgagttctattttaggaatggctcctgtattttctttcaatattcatggaactctgcctacccaatactattggatggttattattttaggaatcattttagggctgcttggcgctttttataataaagccttactatttgttcaaagcctctataatcactcaaagcatttaaataactatactaaattattaataccttttattttggcaggaattttaggattcactgttcctcagctattaggtagtggcgatactttggtcgacttattaatcgaaggaaaattaacaatgtccttaattcttcttttgctggcagggaaattcttatttgcaattacctgctttggctcaggagctccaggtggaattttcttcccactattagtaattggctgtttgattggtggtgcttttgctaatatctccgtcgattacttaggtttagatcctatttatattaataattttattctactggctatggctggttattttactgcaattgtaagggctccagtgacaggaattattctgatttttgaaatgacaggttctttaaatcacctcttatcaattgctattgttactatcgttgcttatgttgttgccgatttattaaaatctaaaccaatttacgaaagtttgttagaaaatttattaaagaaaagaagtcttccaactccacagggagttggagaaaaagtattattagattttatgattttacataattctccattggataatcatttagttaaagaaattcaatggcctaatcactgcttgattgtttcacttagacgtgatggacaagaattcattccccatggtgacacttatttaaaagccagtgatagtattattgtcatgtgtgataaaatagatgaaagctatatttatgatactctttcagctctaacaactgaacaaatttaattaataaaagatagttataaaataaagcgtgaaatctaaattaaatgatttcacgctaatttactatctctattttttattgtcccaataatatgacgtgctacgatgattccatttgctcctgcctgagccagccctcttgttaatccggctccatcacctgctacatacagatcatctatttcacattcaaacccttctcttacctttggccgcgctgaatagaatttcgcttccactccatacagcaacgtatgctcattcgctatccccggtgttacattatccagtgcctcaatcatctcgataattgatttcatcgtgttgtacggtaataccagccccagatctcccggtaccgcctctgctaaggtcggctctgtatacccttctttcaaacgcttgtaagtcgttcttctccctttcttgatatctccatatctttgcaccatgactgatccgtttgacagcttgttcgccagtctgctcacctcatgtgcaaattcattcggttcattgaacggctcgctgaaggtatgggataccagcagcgcaaagttagtattcttgctccccagcttcggatcatgataggcatgtccgttcgccagcatcgtcccgctgtgattctctattactacatgccctgacggatttgaacagaatgttcttacttttgttccgacacttgtattatagacaaatttaccttcatacagattgctgttgatctcttccattacgatattgctggtctctacccgcactcctatatcgacctgattattataaagctccagtccatgctgtttcagtacttttgtcagccaggcagaaccgtctcgtcctggtgccagtacgatcttcttcgctttgatgacctcatcattttccagaactaccccgacagcatgtccgtcttcaaccagcacttcctttacagctgttctaaatgccatatcaatatgttctttcagttccgttgacatttctgtcatgatccgcagattctcttctgttcctaaatgtcttaccttggcccgcagcagttttaatcctactgcatagcctcgatgttcaatttctttgaccttgtcagtcgtaggatccgttatttctctggttgctccgtgttttaaataaagattgtcaacatagttgattacatcttcaacctcattggttgaaagatagtcagtcagccagccgccaaattcactggtaatattgaatttaccgtcagaataggcaccggcaccgccaaatccggctgtaatcgaacaggcaggaagacagcccggttcattgttcctgatgattggacaggacttgatcttcttttccttgattggacagtgacgtttcataacatcctgacctttatctataagcaatacgttcaattccggctgtttcaaatacagttcatagcaggccatgattcctgctggtcccgctccaacaaccacaacatcataattatttttcatctttcctccatattaaaagtggcatcggccactttattattctgcttcatttgcaagtgtgtttttttcataaactttaaaaaatggataatatactccaaccgaaataataatcaaaacaatcatgaagattacattacgaatatccaatgctgacaaaaaaccttgagcaaaaaatggcgtaaatgatggatcaactatatatcccattgaaactaatccaattttttgaactaaataccctaaaccaatcgaaatacacggcattactaaaaacggtatcgataaaattggatttaatacaatcggagccccaaacatgattggctcattaattccacaaatcccaggaacaatacttaaacgaccaatcgagctaatatgcttagatttagaacgacacattaataaaaccaatcctaaagtattaccagctccacctaataaagcatatctaaacatctgtaaattcatgattgctgttggatcttttcctaaatttactaattcaccatttagtcccgtattcgcaatccccaaagcaaaaactattggaaatacaattgaagaaccattaattccaaacatccaaagaatatttgaaaataaataaattcccataaacatccaaacattatcaacccctgaaattgcaggtgttaaaaacgacataattaaatttggcatacttttccctgataaagctactaaaatcaaattagccccataaataacaatgatatttagcgctaatggcattaaactatttacaaaattagtcactgcactaggaacactatctggaaaagtaaagactattcgatgactgactactcgtgaaatctctactgatattaatgaaattattaaagcaacaaatagaccatccgcacctaaataactcattgtaatagctccatcctttaatggagctgcaaccattaaaaaagtacacatcgaaattatcccataaaccgaagctttcatcttataactttcagctaagcaataagcaaccccaaaagctgaaatcaaaccaactaagcccattgtataattatatggtaaagttaaaacatcataattagctaaagcaaattgtttccagctaattaaaaactttaaaaagatatttcctgtattcaaatcaaccaagtctaaattaattggcggattggcaataattaagaaaactgaccctactacgattaatcctaatgacatcatcatacccgatgaaattgcttgaagatgtcgctgctgagccaatttatttgcaattggtcctaataatttctctaatttactaatcaattttttatccccctattaaaattgccaaccattaaaagtgaacgctgtttcactaacattctctggatcatattcttcaagaatttttgcatagcgttctttataatcgttatccacctccatttgtggaataactttactagcttcattcaagaaatggaatgaatcacgccccatggcttttcctcttactgtatgcttgtctaaagcaacatcaggtatttccggtaattttcccatcgcaaaagatttaatacagatattttttaataaatcactagaacgatctttttgacaactgcataaatatctaatcgcgtggataaaatacattggttgatcaccatcagcataatcaaaatgttttgacatttgatataaattatttactaatactgcagccatcggatctcccattccaatatcttctaccgaaatagttaataatcgacgccacattttttctaataattccggtgaagaaatatacatttcataggcgaacatacatgcctgttcttctaaactgcgacgaattgatttctgtaaagctgatattacctcatctccagcataaccatttcttgtaataatctttgaccatgggtcgtacatcgtttttgccataaacttgctcctttttctaatctgtgacataatctaattgaggtgataatatgaatatcgaacatttaagagataaatttgatttaaatgaacttgaattagcattagttaaatatcttgaagataatcaaaataatttaaaagatattacgattcggcaaatggccagcgctaatttcacatctacttctgcaatttatcgtctttgcaataaatttggttttagtggctacagtgatatgatctatcagctgtcatcatcgaataatacccagcttttttctcctgatgatcttgaacaatatattccagcattcattgaattattaaataaacatcgtcaacataatatcatcgtttttgggatgggattctctgctccaattgctgattatttgcaacagcgtctaaccctaaatggattttatgcaatgaatgttgtccatactgaaatgcttgatattaaatatcaagataattccctatttattgtgatttctaattctggaattacaccccgattagttgaaattgtcgataatgcttttaaaaataacatcgatataattagttttattgccaatgaaaattctaatctttatcaaaatgtaacactaccaattattgttggttcttataattcatttactcataacaatttagtaccaaataccttctttggtcaggttctaattgtttttgaatcactcctttatacatatttgtcctctatagaataatatacgcttataatgacaaaattaaatagatgttctcgataaaaaaacatgtttcaaaattcgaaacatgttttaatttaactataaataatgatattcatgctgccattcgctagtaacaaaatgtttagccgcagctttagctttttctaaatccataaatgagtaattgccacattcttccatcttcgctccaggtatgggttcttgccaatttgcaatctgttcaaataattcacgtacaattttgattactcgagccaaatctaattcttttgtaattaaataaaaacctgtcatacatcccattggtccaaaataaattattttatctttgttttcgccgttacgaagtaatgttgccccgatatgttcaattgtatgagcaccacgaggatctaaagcaggctctaaattaggtgtagtcatgcggatatcaaatgttgttaattcaccatctatccgagatacatagacaccttttgttaactttgtatggtcaacactaaaacttgttattcgttccatgttaatccctcgtatttttttatatattgatatccaacaccaccaacacccatatgtgctcctacaaccgctggtaactctcgaacggtaatctcacattcaccaattcgatcaataatcgcctgtttcatttgatgagctaaatcatcaactaagacatgttcaatagcaataataaagtctttattgttcaatccacattcattaactaaatgatcaactatctttaagttggcttttttcaccgttctaactttatctaaagtatcgatcttaccgcccaactcataatttaatttcattaccggcactatttttaataagttccccaatagtgctaccgctggagtgattcgtccgcctttctttaaatggtctaaattaggtgccataatcacagtcgctgaatcctcaaccattgctgttaaaatcgtttcaatttccgcaacacttttaccatcatcaattaattttttagcaaccctaattaaatagcgatgattactagccgtacccttagtatcaattaacgtaactggtactcccaccatatcacaagccaatttcattccattcaaggttgaagataatccagttgcaatcggcaaagcaataatatgatcatatcccgcatctttaattctatgaactgcattttgaattgaacctgttgaaggctgtgatgtcatcaccatttccccagttttattcattctttcaaatacttcattagcacttatttcttctaaatctaaatatgttttattacccattgtaatcgttaaaggtacaatataaattccttgatcttctaacgaaccaattggtaactggcatccactatctgctaaaacagctatttttttcatggtctcgccctccctataattacgtaactaatataccaaatttatcatacttttgctagtaatatgtgttatgataataaagaaatgagggatttaatgaaatcagtacgtgaaataactacatataaatggataattaaaaaatcagaatttatttgtactttaataccgtgtaatgacgaaactgcaattgataatattattaaagaatatcaagaaaaatatcatgatgctactcataactgtattgcttatatcgttggtacccaaaaacgtgccaatgataacggggagccgagcggaactgccggtctaccaatgttagatgttttagaaaaaaataaacttactaatatcattgctattgttacaagatattttggcgggattaaattaggagctggcggtttaactcgagcttatcgtcaaagtgttgctgatgctttaaaaggagctgagattgtagaaaaattcagtgttcctttatataaaattacagtggattattcatacactaaaaaatttgaacacttaattaaagtacatcatattaaatgcattaatacagagtatttagatcgggttagttatacctgttatcttgaaaatgaatcttttctaactattattcaagatctaaccaataatacctatacaaaagaatatttgcgtcatgattatattgaattatcataattcatgaaaatgtcacataaaagagtataataatacttaagaggtgataattaaatgaatgaaattaataaaatctaccaagcgcatatgagctacgaattaaaattggtcgttgatcctaatcatgctgttttaaataaagataaggttgaagcaaaagtactagcttttctttgtgaattaggtaaagtcggtgaagaagcaaaagtatttagcttttgggataattcatctgccaataacaaagaaatccttaactattatactgatgcccttcatatgttgatgtcaatcggatttgaattgcacgttgacaaactcaagaactatcaagaaatcaacaactccaacaatattgccaatcaactaatcaaggtttatcaaagcgcattgaaagttaatgaaacctacagttttgaagcattccaaaactgtattgatgattattttacattaggttttaaaatcggtcttgattttgatacgattttagcaaattacagttcacaaaaagactaaacaattaattgtttagtcttttgtctttaagtaacatctcaataaatttttgatcaaaatcactttctaatttatccgcatataatcttgcttcatatgaagttaaccctaaagccaatatccatcgataaacttgctgataacttttcaaactttcttgtgccaacatacttccccgctctgttaaagtaatgttatttttaataagatcaatataccctgcttttttcaattgtttaattgcaattgaaacacttgaacgtgcgtatcctagagataaagccaaatcaatttgacgtaccttttttccctccaacaataattgataaatatatcgtaaatatttacgatttgttgcttgtatcattattttactcctttgatcatgtaagcactattcgatacctttatccattttatttcatgaaataattcttccaagaacgaaatcatttctttttttgaataaattctaacatccccatctttattaaagcgaataaaataattcataacctgccgagcaatgactggcaaatatgtgtcaccaataatcaatgttcccccaatttttaaaacacgatatatttctgcaatggccttttgaggatttggatagtgatgaaatgaatcattacaataaacaatatcaaaagtttgatcaaaaaatggcaaattctcactatctcctactactaaagtcgccttattcttaagttggtgtttagccttttcaatcatttgtgatgataaatcaattcctgtaagatgtcgatgtgaatcctcactaataacttgtttcattaaagctcctgtcccgcatcctaaatcaagtacttcctcaccataacagcgaataatttcatttaaaagatatggataaattttacgggcatgttttccataaaaagtagtatcatattttgaagcctgtaagtcaaatgtttgtctagattgttcttttttattcataacgccctccttaaatgaacgatgttcatttttttgttttaattttaatccctagagtcagggattaaatttcattaattgattaacatactgattcaataattttgcaacttcatgatgatcaatattacttttagataataatccaacttgaccatatataataaaactaattaatgcctcaggattttcaatatatatttctttagctgcaatagctttttttactgcttctaataaatgtggatacatatatttgcataatttgattgataattgttcatgtaattcttcattttcaacacgatgaaaaaaatcataatattgcatatttgaatgctcatcacctattgaagtaaataatgcatctatcttatctttaatcgtaatagtagaatcatgtaaaatagcaagataactattacaacactcttcaatataaagatcgattgctgtattaaatagtatttgttttgaatcaaaatagcgataacacaaacctaacgaaactcccattgtcctagcaatatcacgcattgatgtttgcgcgtatcctttttcactaaataattgcatcgcagctttgataatctctttttttcgttcaattgttttattaaaacgctgactagtcatctcatcatctcttttcacacttattatatgctatcatcaacaagcattcaatgaacattgttcattttttgttagtttttctaacaaaaaaaagagatttgctttaaaaacaaatctccctattcaagaatactctgtttgctaactgtttaatgtcgttatcaattgattgattcgctcaagccattgatcaccttttggcaagacaattacaattttaccacctaattgcctaaacacaggtttagtgaaaagtcgattgactaattcaaacaattgatcccctttaacattttgactatatcctttagtaaaagtaatttccatcttccctttaacttccgctaagttttcaataatttcagtagatgctaaaatatctaacttccgtttttctactaatgtacttacttcctctggtaatttaccgtaataatcaataaattctgattttagatgatcaacaccgcttatcgttttggcattatctagacgctgatatagttcaagtttttcaatatcactagatacataatcatgaggaatatatccatcaactttgacattaacacttttgatttctttttctgcttccacatcctctttacccattttttcgttaatagcatcttgaagaatcttcatatacatctcaaaaccaattgaatcaataaagcctgattgtgtaccacccaaaatatctcctgaaccgcgaattgctaaatcacgcatagcaattttatatccacttcctaattcagtaaactccttaattgccttaagccgtttactagcttcttcatttaaaactttagtaggattatataacaaataagcatatgcaccacgattacttctccctacgcgccctttaatctggtataactgacttaatccaaatttatcagcgtcttcaacaataatcgtatttgcattaggaatatcgattcctgtttcaataatcgttgtgcaaacgagaacattaaattccttgttcacaaaacgcatcattacatcttctaattcatttttatccatttgcccatgacctaccgctacccttgccccaggtactgataaagtaatattataagcaacattagcaatctgactagttcggttatacaaatagaaaacctgtccatcacgagctaattctcgttcaatgatctgtttaattaaaacattatttttttcaataacatatgtttgaactggctgacgattcttaggaggagtttcaatttgtgacaatccacgaattcccatcaatgacatttgtaaagttcgaggaatcggggtagctgtaagggtcaaaacatcaatagttttacgatactctttaattttctctttttgtttaacaccaaaacgctgttcttcatctatacataataatccaatatctttaaaaacaatatcctttgataagattcgatgtgtccctacaagcagatcaatatttcctaattttaaatcacttagtatctgcttcttttccttagtcgatgtaaagcgattcaataaagcaattttgacaggaaaatccttaaatcgtgcaatcattgttttataatgctgcattgataaaattgttgtgggacacaaaaaagcaacctgtttatttcctagaatagccttaaatgctgctcttaaagcaacttccgttttcccaaatccaacatctccgcatagcaagcgatccatcggctgactcttttccatgtcggctttaatttcttcaactgaacgtaactggtcaactgttaattcataaccaaatgagcgttcaaactccagctgaatctcactatcacttgggaaagcatagccaggctgattaatacgagcagaataaatttcaattaacttatcagcaatatcatcaactttactccgtgctttggcttttgttttctgccattgtgagcctcccaatttattaattttaggaactttaccctcattacttgaatacttcctaatcatcttaaattgttcaaccggtatatataaagtatcgtctccagcataggctacatataaataatctttatgaaatccttgaacttctaatgttttaattcctaagtattgccctatcccatgattatcatgtacaacataatcaccaatatttaattcttgataatcttttaaaacctttgcattcttatacttaaaatattttggttttttaatattacgtgttttgaataattcatttgcacttataataacaattttttcatcaactaattcgattccaaaaccaattttatttaccgcaatattcaaccccggatatatttcatcttttatcccaatcaaagtatatgccatttcatgacgatcaaataattcagtcattaattttaattgatgatcatcatctaaagctacaacaacttttgataactttaaataagctctaatttgattaataatcattgcctcatcatcattattgatcataatagcacgagcattaaacaacacatctttatcactttgagcaaaaggtttaaaattaactgattttctatcaatcacttcatataaatctctaaatagattcaaacctttaatagttttcccaatactagccaattcttgataataataatgattttcttctaaatagttcttataagcaaaattaatatcatgattgtttgcttggatgattagcggggtatcgagataatctaataaactagctgtctgattaaataaattaaaataaccatacatcgtaaaactagtatcatgattccgcaaattttcttgatctattgatactttacttaaataatcttcttgatataactcatcaagttcttcaatctgccggtctcttaaatcattgattttacttaaaacagccgggacttcttgttcatcatataaaatatcactagctggaataatggttacttctttaaccttttctatcgttctttgactattttgattataaaaacgtatattatcaatctcatcatcaaaaaattcaatccgtaatggattatcatattgaattgaaaaaacatcgattactccaccacgtttagaaaaataaaacggctgatctactcgcggtgctgatgtataaccagccttgatcaaaagtttttgcaaatcatatatatcaatttgcattcctgtttttagatttaaacaattatctaaaaataactgtctacttggtaaataccgtaccagggcctgtccatgagtaattaaaattttaggctgatcagttgtcaattgatataaagcatcaattcgctgtcctaatagttctggcgatgaggctaaagcttcaattcgatatgactcatcaactggaaaaaataagctgtctttttcattaatcaatgaaatctgttgatacaacaagttagcctcatactgatttggtttaattacaataatatctttttgtaatgtcaaaaaggcactagttactaatagtgcctcatcgttaagatcattaacaatgatattcccctctccctttaacaatgttttaaaggcagggttttgtttcaatatttcatctatcttcttcatataaacctctaattataacgattcataatgtaatcaaaatcatgatcaagataatccaaaacagcatcactagccttatcaattccttgattgattgcttcagtctcctcttttgcaaaccttgataaaacataatcaactactttcatatacttgtgacgatcaattcccacacgaattcgtttaaaatcttgactagataaatgagcgataatgttttttatcccattatgccccccagcgctgccagttttacgtaatcttaatttaccaaccggcatatccagatcatcatagataacaataatatcttctttatccagtttaaaaaaattcattgcagcaattactgactcaccagaaagattcatatatgtttgcggctttaataaaataacatcttctccatgatattttacctttgtatataaacctttgaatttattctgatttatttctgtatttaatttattagctaattcatctactaccataaacccacagttgtgacgagttccttcatactctttcccagggtttcccaatcctacaattaatttcaatttaattctcctatcttgctagaacaacaatcgttctagctcctatttgctgatcagtaatttcaccataaaggtgctgataagcagtttcttcataatcaaatgtaaaacttgatgggttaatgtaaataacaaattcacgatattcaccttcatcttgttttagagtatattttaacattttaaagtcaatattttcaaccataacatttgcttcaatctcttttctagttgcatagcgaaaacacttattatctttacgtaattgaataatttttcttatctcattaatatcatctttataaatatctcgaaaatcccaattaatacagttaatattatcaggtgaattataagtattcccaatcccgcctttagttcgataaaattcttgtcccgcatggataaagggaattccctgcgacaataacaccatgatcgtaagattcttttgtcgagttattatcccatctaaaccttcttcaacattagaaatatacaatttatcaaaaaccgtcgcattatcatgacattcaacataattaattgattggtccggacttgtataacgattagtcgctgtaattacatttcttgccttttctgtttcgtaaagatttcccgtaataaaacctttattaactaaaacattgtcactgcttccacctttaataacctcacgatattcatcattaaaaaaactaattttcggcatttttgcatgattatcctgcatcgccttttgctcatctggtaaattagtcggcatattccaaccctccccataaaccataaatgaagcatcataagcagaacaaatttgatagacacgattaatcgtttcaatatcaataattcccattaaatcaaaacgatacccgtcaacaccataaaaactttgccagcgtctcgacatatctataatatacttacgcaccatatgttcaccactatccaaatcattaccacaccatgaaccatttgataaactcccatctggattttttctaaaatagtagccaggtacgattcgttcaaaagcactcgcattaacatcatacatatggttatagacaacatccatcactacccgaattcctttcgcatgcagatctgctatcatctgtttacactcaacgatcctgctgtaaccatcattaggatttgtacaataacttccttcaggaacattatactgagctggatcatatccccaattatatagtacttcctggtgattttcatcgacagtcgcaaaatcatagattggcaataattgtatatgtgttattcctaattccaccaaataatctaaccctgcactattaccatgtttagtcaataacccagtttctctaattccagcgaattttcctttgtacttacttaaactgttttcatacatcgtaaaatcacggacactagcttcataaataatcgcatctgtcttattttttaatggctttaaacattcccgattcaggtcgatcttaatcttatttaaatcaacaatataactacttttaccatttgatgaagatccataagcatatggatccaatgccttaatataactatcatgatgtcgtactagataaacatactcacagttatcaaaatttcccgcaacatatgaacaaaaaacaccgttaccaattcttttcatttcataactatatgtagtatggtctttagtaattgcaactttaacagctaacgctgttggagcccatactttaaaaatcgtataatcttcatgatatgaatttcctaaatcattaccatcataatagttattttttaaaaactcagcatcatagatcagttgagtatattggagggtttccgctaaaccatatgcatctacaatttgataaacatgacaaaaatctatttcgacattatcgaaatagtaatgaacgtattcttcttctacaaatttagcggatatttctatttctatcaaagtattattatttaaatctctcaaataaaaacgaggacaatttccttcgtaatatcttctaatcaattgtacttcgattttatttacagataccatctttgcaatcattctaatggcacttttttccatgattttcaccctttcatctcgtgttcattatatcctatcacttctcagatagcaatgatataaaatgtagataatcagcatttttttagactatatacagataatttgggttttatcaataacttatataccaattttaatcaaaagaaaaagggattttcaatcccttaaaattttactttatctaaatgccaaatatcgtcaacatattgttgaatagttcgatctgatgagaagaacccactctttgcaatatttgttagacatacttttgcccatcttgaacgatctttatatagatcacgcacagaactttgagcttggcaatatgcttcataatcagccaaaacaaaatattcatcatttttattcattaactcttcaaaaataacccggaattcttcacgattctcatggaatgtaccatccatcaagctatcgataattctctttaatcttggattattattataataatcccatgccttataagcaccactcatttgtaattctttaacttcatgatctttcattccaaagattacacagttttcttcaccaactaattctgcaatttcaacatttgctccatccaaagtccctaatgtaatcgcaccattcatcataaatttcatatttcccgtaccactagcctctttaccagcagttgagatttgttccgatacatcagccgctggcatgattttttcagctaaagtaactccgtaattttctaaaaagactacttttaagtatttattagtttccgaatcattatttacaacatcgccaacactattaattaacttaataacttttttagcaaaataatatccacttgcagcttttgccccaaaaataaatgttctcggttcaattctaaaatcaggattttctttcattcttaaatacagatcaataacatgaagaatatttaataattgacgtttataagcatgaagacgttttacttgaatatcaaagatactgtcaacatcaacagtaattccgttatgttctttaatatagtcagctaaaatttgctttctttcttttttcaccgccaagaaacgatcttgaagggtaagatcatctaaatgccccattagatcttctaatctttccggatgcttgatccattcatctccgatatattcactaattaatgatgatagttctggattgcaatatgctaaccagcgacgatgtgtaatcccattagtcttattattaaattttgatggatataattgtgcaaaatcttttaattcacgttccgctagaatatcagaatgtaattttgccaccccattgacactaaaacttccaacaattgcaagtcgcgccatgtagactgtaccatcgcgtaaaatcattactcgattcaataactcttcatcacggtcacttgccattttaacatacccaataaaacgtcgatgaatttcttcaataatttcataaactcttggcaataatgactgcattaaactgattggccatgtttcaagcgcttcagctaaaatcgtatgatttgtataagcaaacgtctgtgtcgtaatatcccatgcttcttcccattcatatccttgttcgtcaatcaaaatacgcattaattcaggaattgctaaaacaggatgtgtatcatttaattggataacatttttttgatggaaattattcaaatttggatattgtcttaaatgcgcccttacaatagaatttaatcctgcacaagtaaagaaatattcttgtttcaaacgcaacatttttcccgcaggagttgagtcatcagggtataacatttgacaaatatctctaacattttggatatattgcctaaaatcttgatttgcaggaatattatcacttgcttcagcactccacaaacgaagcgtattagtatttgtagtatcattaccgacaatagggacatcataaggaactgcgtacacttcctcagcatcaacatgttcatatttccctgtcgtttcattaaaaataattttaccaaagaactttactggtactcgatgtttcggctttctcacttcccagttaaatcctgtttgcatccattgatctggtaattcgatttgataaccattttcaattttttgtttaaataatccatattcataacgaatcgtatgcccatgccccggatatgctagtgaagccaatgaatccataaagcaagctgctagtcttccaagaccaccgtttcctagaccagcatctgtttcaagctcctctaaatcatgaatattgattccatattcttcaagaccatctttagcaatctgatatattcctaagttcatcatattatttactaataatcgtcccattagaaattccattgagaaataatgcatttgtttttgatagttattacgaataatcgctttactagtcgcccagtttactgaagcatagtcacgaaccattgtttccaaaactaagaagcgttcagtaatatgtgcttcttctacagttcgtccataagattctataattcttcttgaaaattcaaatttaaattcttctttattcttaaacattttatctcctcttataccagttcattatttagagcctttatattcgaaaatcatgctgccaaatggcgcaatatttactggtatgtaatattccttatttaaagtttgaccctctttagcttttatagcccgtttattaacgaaattgcttccagtatagatatcagtatcactatttaaaatttctttataacttcctggctgatttactggaaccatatatccctcatgtttgtttcctgtaaaattcataacagcaattaaagaacttccatccgttccttttctttcaattgcaaatacactttgtgctcgatcatcaacaactaaccattcaaaaccatccattccataatcctgttcatacatacatggatatgttttataaacttcatttaatctaatcataaatttatgaaaggaatcatgaataggatacttaagaatattccatcctaaagctaccttttcatcccactctttatattcacccaattcatttcccatgaaatttaatttctttccaggatgaatcatcatataagtataaagtgtttttaattgggcaaatttttgttcattattaccccaaattttatcaatgatagttcccttactatgaactacttcatcatgagaaaatggtaaaatgaaattttcactataaaaataagccatcgagaacgttagtaaattatgatcaccttgacgataaactggatctagtttcatatattttaaagtatcattcatccatcccaaatcccatttataatcaaatccaaggccaccaatatctggtgcttttgtaacgccattaaaatcacttgaatcttcagcaatcaacatcacaccaggataataacccttcatatgattattcatacgtttcatgaattctaacgcaccatcattaactccagcttctttattgcctttccaatagatcaagttacttaccgcatcaaaacgtatcccatcaatgtggaaatattcagctaaaaagccaacactactcattaaaaagcttctaacttcttcacgcccaacatcaaaataaacactgtcccattcagtataacgacgattaatatctggataatcatatacaaatccaccatcaaacttataaagaccatgtccatcttttacataatgtgcaggaacaaaatccataatgacacctattcccgccttatgacaagcattgataaatttcattaaacctttcggttcaccataacgactagttatactaaaatacccagttgcttgatacccccacgaaccatcaaacggaaattctgtcagtggcattaattccaaatgagtatagttattttcaactaaatatggaattagaagctctatcatctcttcataagagtagaattcaccgtcttcttctgccgtaaaatcctttttcattttccaagaaccaatatttacttcataaatattcattggtttatcaaaattctttgttcggctattaagccattttttatcagcccaacgaaaccgttcaatattgtaaacccttgacgctgttcctggtcgtaactcactataaaacgcatatggatcagcacgatctactgtcgcaaaattttgtgtttcaatccggtacttataaagagcaaattcttttaccccaggaataaataaagtccagattcctccatctgtatacctttccatataatggttttgcccatcccagtcattaaaatcacctacgacttgtacacttcgtgcattaggtgcatagacggtgaagcggacaccttttttgtggtcatttgtttctaaatgagcaccaaatactttatacgcttctaatgtatttcctttgtgaaatacgtgaattaaaaaatcatcgagcatgtgtcactcccccttttcttagatattcccattataacataattaatctggtatttcattaaaaagatagcgctttcattacgctaataattgataatataatactaaattcaacatttatttaagtaaaataaaaaaagcggcctaataatcaaacattcttgattttaagaccacagcagcaaaaactatcctaataacactaattttatataattttcttacatgatttacgttctagtaacgagcatggcaactgtactcgcatcggaaataaagcttttttctttaaaatcatttcatgtaacagcatcgcaccaagatttcccatctcctttgaaggcgcataaacagtcgttaatgatggtgtagtaaaattaccagcttcaatattattaaacccaataatagaaacttgttcaggaactcttattccctgatcttgtaatgcccgcattgcacctatagcaattggatcgttgacagcaaaaatagccgttggaagttcctcggttttagctaaattatgtatcaaattatagccagcttcactcgttaattcattttccagcagcaattcagtatatttcaagccaaaatactggcaatatttaataaaactactctttctagtactaatatgaagtgataattcttcgtactcgccccgtcctaaaaaaccaatatgtttatgacctaaacggttaaaataatcaaccacctgaaacattgcgttatcaaaatccaaagttacacaacattcagttacagggctgatatccatatccaacaaaacaatattttcagtgtactcctttaattcttttaccacttcaaattcaaacttaccaatacagataattccttgaacattttccaaaaccttatttaaatccatatcgtcttttctaattcttttagcaatgattccatttgtttttaaataattttcaacaccttgaatcaaagataaataatatgtatcgcgcatttcttgttcaaaagaataccactggataactgccactgtcaaagcttcatcatgatttcccttacgttttgatttaggaatatagtttaattgttcagctgctttgatgactttttctttcgtttctggtaaaacagtcaatgaattatcatcatttaatattcgtgatacagttgcgattgaaacattcgcaaattcagcaacctcttttaatgtagccatattaaccctcctcaatcgataaaacagctctttcatagtattataagtgaattctatcataatttctagatattcttttaataatcatttctcattaagattattagtaaaaaaagtttaaattcacttgtctagaatttaaacttcttttaatcagaatacttctactgtttatagatattttggctgaccaattaattcaatcttgtcacgatagcagccttctgtttcaaaaataataatttgattaatccctttttttaaaaacggacctggtatatatagtgatagtgttggtccggcctcatagaatctgccacaatgatgaccatttacaaagaccacaccctttccaaagccttccaaatcaataaaagtttctttaacttcatcagcttcaaaaatatattcatggaatcctgggcctgattgataaccattttcccagttcaataaatcaagatgctcaaaattaagacagtaatgtttccattttttggtaaaatggatatctaaaattaccccattacggattcctttttgttgcgtctcagcttgtaacttagaaccataattgacccgacccatattttccattaatatctttaaatcatgagtatcattgctatgtgtcggtaaattaatctcatcaccaatttcttcttgatattgagtagcaatctcttgatcatccagatatatttttgctcgatcacgtccatcaataattcgcatccgtaaatcatcagtataacttttaaaagtatgttgatagaccacgtaaccataataatgatctaactcttccatcgttaaaggccaatcagactgatgacaggcagcaatacaatcaagcgtactaaataaagagacacttcgattttttattatttgaccataatttttagtttgacgccgctctggtaaacgctctttttttccagtgattacttctctcaataaatggtatttctctgttttagcaccatactcagttagaatcgcatcataatcatatgaagttatttggggcaaatcatgttcttttcgagccgaacagccattcatccatccaaaatttgtcccgccttgaaacatataaaaattgacactgcccaacgacaacatttcttgcgctgaatttacaaattcttggggatctcttttaattatttcttgattccagcgattaaaccagccatcccaaaattccatacacattaacggtgccgtaatttgatgggattccatgaatttttttaacaccgtaatattttcttttgcttgtgatccaaagtttcctgtaggaaaaacttttttttccaataaagaacccgcatttaaggcttcatgccatgttccatcagctgtaaagagaggtacttcaattccatattttctcatcatctgatacacagccaataaatattctttatcttcaccgtatgaaccatattcattttctaattgagccaatattatcggcccattttgagtaatttgatacttacttaatttaggtaataaaattgaaaaatattgatccagacatttaagatattgtttatcactagttcgtaaacgaatacgaggatattttaacaaccatgctggtaaaccacccatttcccattcagcgcatatataaggtgaagctcgtaatataacaaataattccaattcctcagctagtttcaaaaatgtttcaatgtctttaatacccgaaaaatcatattttccttgatatggttcatgtagattccatggtacatatgtttcaacagtattgcatcccattgcttttaaatccaagagtgtgtcgcgccaatactcaggtacaattcgaaaataatgcactgctccagaaataatcttaactttatttccattgatgaaaaactctttatttacttcaatactacccaatattatttacctcttccacttatttttcttcaaatttaggattgtttgccaacttaacaaacggtaaataaataattacagctaaagccagatttacaagtgataaaataattgctcgccaatcaaaaccagttgcaaagaatccataaagaaccggcggcatgacccaagtaacattttgtgtaactggtgcaactaatcctaatgctgttgccccataagcaactgctgacaatacaattggtgccaacaggaaaggaatgaacattaacggattcaagacagttggcagcccatacataacaggttcaccaatattaaacattactggagctatacctaatttagctacttcacgataatgtttatttttagattgccaaaaaattgcaattaacaggcctaatgttgcataccagacaaaggcaccatatgatacactcgtccataaatatggtatttctgttcctttttggaaagcttcaagattcgccaataatgcaacaccaaaaacaccttccatgatcggtgccataacattcccaccatggattccaaaaaaccaaaataattgagttaaaaaagctactaaaataatagaaagcggattttgagagaagcccaacaatggtgtctgtaaaatatcatagatccaatcaataattaattgacctgtcaccaaattaaatccataagtaattgctgctacagcatacatagcaataaaagccggaataattgaagtaaatggcaccgagattgccggaggtacagaatcaggtaatttaatcgtccagtttttcttcatgaatttactataaatcactaccgctaaaaaaccaataacaattgctgtaaaataaccacgtgaattaatttggtttcctggtaataagccattgatcgttactgataaatttccatcactaaaattcaagccagtgacctgattaataattttcccaatatcagcactaacaccctctaattgaaatgtttgagtaatacttgttcctaaagaaataacaaatgatgataaagcaactaatcctccagataatttatctgtttcgtatactttagcgatattatatcctaaagcaaaaataaagactaaggaaacaattgctaaactcccattaaaaatcaaattattaatactaatcaaccattgaaatgcgtcagtgattcctgtccacccaaattcagcaggaaaatctacaaaaaaagcatttaacaataatgcgatcgatcccgtcataaccacaggcatcgttgcaataaatgaatcacgtaatgcgactaaatgtttttgtgaaccaattttagttgcaataggcaataatctttcagacataatatccataagtctttgatacattttcgttctcctcatatatttatttttagatatttgttcatcgatgtttttatatctatttatattatataattataataaaataatgtaaatatttttactgattattttacttatttttacttaattttattatattttaactaaaataattaaatcttattaaaattatactaataaataaaagcaaaacagtaaaataataatttttttttactgttttttactgattttaaataaaaaagatggagctaaagagtttttactcaaattagagcataaactctctaaagtccatctttttataatctattcaccaataatacttaatatatctttttggaaaacttctgtttttacactcgcatcatcagcatcattaccttttattgaaaaatagaatttacattttggttctgttccactaggacgagccgcaatccatgatccatcttccaaatagtattttaatacatttgatttaggtagatcaataactgtcgtagtttcattttcaatacgttgactactttgataatcttctactgctaatactttatatcctccaatcacacttggagcatcttttcttaaattatccataatttctttaatacgttttgcaccttcagctccggctttgcttaaagcaatttgcgattctttaaacgtaccatgtttagcatataattcatttaaaacatcaattagatcttttccttgatgtttatagaaattaccagcttctgctgccattacaaccgcttgaactgcatctttatcacgaacgaaatccttaactacacaaccataagattcttcatatccgaagataaattctttttcttttgttttttcatatttacgaatcttatcaccgataaatttaaatcctgtcaatgttttttcaacctcaacaccataagatttagacaccaattcacctaaatcactagtaacgatcgtattatacattactgcattagctggtaatttaccttgctttttaagttcgcttaaaatatattctaaatatactgcagcactttgatttccagacatcaatacatattcaccatcatgtttagcaacaacacctaatctatcaccatcaggatcgcaaattacaacgacatctgcatcaacttctttagcttttttaattgctagatcatatgagcagtcaacttcaggatttggtgatttagtatttgaaaaatcaggatctggtgcacactgagctaaaaccggaataacattatagcctaaacgactcaaacaatttctaactggtagatttgaagtaccgtgttgtggtgagaaaacaattttgaaatcttttttatccataccgggattaatttcaattgccattacttcttgataatatgcttcatctacttcttcaccgatccatgtaatatatggataagcttcttcatcgctaattacttctactgccaattcatctttaacttcatttacatatgcaactacttgatctccccattcaggaattaattggcatccagtatcatcatatactttataaccgttgtattctttagggttatgacttgcagtgatcataatcccaccagcacattttaaataacgtactgcataagataattctggagttggtcttaaactttcaaaaatataagatttaattccataagtagctaaaactttcgcactttcaattgcaaatttgtaagacatgtggcggttatcataaccaattgcgactccacgttcttttccttctggtaaacctaatacatatttagcaaagccaacattagcctttctaattgtatagatgttcattcggttagtaccagcccctaaaattcctcgcattcctgcagttccaaactctaggttcatatagaatgcatcctctttttccttttcattcatacttgctaactctgcttttagtgatggatctaaattttcacaatttacccatctttgatattcttcattgtagttcatgtttttcacctcttaatttaattataacaaacctgtaaaaaaataactacttgttttataaatgaaattactacaaattagaactcaattcctttacgcgcttttattcctttatcatatggatgcttatgtttcttaatttcactcgaataatctagaatcggttttaatttatgactaggctgacgccctgttaaaattacctcgtgagtttcttttaagcttaccaagcaatcatacactttcccttcatttaataaatttaaagcaattgcatcaagaatttcatctaaaacaattccttcataactttcatctatttgttcaaataactcatcttctaaacgactcaccaattttatcatctctggatcatgcatatcaataaacatctgaggcattttagcatacaacactttaattccacactttttcagcatctttatttcactgctgtcaccgtctttcaaaaattgtagaaataatacttttttatctgccccagccattcttaatgcttgtcctactgcagcagtagtttttcctttaccattaccataataacattgaatcatcgctatctccttatcacatcaccaactaccgcatctaaatatgctagtaactgctttgcttctacaatcatttgatatcctctttttccagcactgagagcaattttatcacactcattaattgagcaatcaaaataagtatcaaattttttcttcattcccactggactacagcctccacgaatatatccggtcgttgctaataaatccttcatatgaatcattgctacacttttattattagataactttgccaatttttttaaatctatttcctctaataccggtatacagcatactaaaaaaccacggtttccttttaaaaccagtgtcttaaaaatatctttagccggtatttcaacttgtgtaacaatatgttcaccacttaaatgatcttcatcatattcatattcctttatttcgtaatcaatctttgcttgatctaataaacgtaaagcattagttttaatttttttagccataaaaacctcctaacaacattattatcttaatccaaacataaattttaagcaaataaaaagaagtccgaggacttctaattttcttattcagctactttttgttctttaataacttttgcaattgaagcaattacatctttttcgtcatcaccttcagctacgatttctactgtagctttagtaggaacacctaaagacataactcccatgattgattttaagtttacttctttaccattgtatactaatttaatattgcttgtaaacttactagcttggttaactaagatagtagctggtcttgcatgtaatcctacaggatcagatactacgaaagataatttttctgccattttatgactcctccttaaaatttctataaatcaattataacacctaaccccttggttttaaagaactttttacataaaatttagcgcttacaaattattcccatatattgctaaaaatttaccttctttaatataatcacatatatttttcaacgattttattcatcatttcccattttgattccatatctttaacaagcttaaattgagttctacaacgatcaagattatgattcttgcgatgaattttgaaataaatatcaccctccaaataatcagttaaaaaacgcatcccacattcaaatgtcataaccttagccccaatcggtaatgctttgatttcctctttcgttaatttaccatcacaacctttgataaaacctttagcataaatttcaaacaacgccatatcacattcgattttatctaaatcaatttcatcttctgcccctgtactggctccaaatcgaatcgaatcaccaaagtcattgactgctaaacccggcataacagtatctaaatcaatcacacaaatacctttatgagttttatcatcaatcataacattatttaacttcgtatcattatgagtgacccgtattggcaaattacaatttgttaatacatttgccacatcttcacgagctaaaacaaattcaatctctgcttgaacatctttagcacgattacaaatatcattggcaactacttctttaaaacgttcaaagcgagctttagtatcatgaaaacctttgattgtctcatgaagtgttgctgccggataatcagccaaaaggctctggaagtgtccaaaagctaatgcactttgataaaaatcttcagcactctcaacttgatcataactagttgcacaagtaataaatttgtatgctcgccaatatccaccagctgaatctacataatatggtttatgatccaaagtataaataatattgagtgtttctctttcgggatcaccctcactagcaataattttatctcgtaaaaatcttgttacgttagcaatattttccatcaattcaatcggtttagtaaaaaccgcagtattcattcgttgcaaaatgatatcaatcattcccattctttcaatatcaaaagtcaataaaaatgtatcattgatatgtccgcttccataaggcttttttttcttcaacacaccttcaaatgaaaatgcttcaactacttcgtttaataactcttcactcacgattgatcactccttccaaagatgcttaggataaacacctgcatcttttaattctttaatcgccatttgaattattggtttatcctcacgataagtgacaccgtaccagcgttcttgagactctagaaccgtaacttctaccttattttgatcaagtaatttacttacaactgcaggaataaaatactcacactttaacggattttcttttaaaccgatttcaaaaaaactatttattcctttttctatctctaataagatactcttattatatccccaaagattcattgaaacaattgttcctttaggcagttcaacccaactttgaccatcatcctcagtatactttgcacctgcaccatttcgaacaatttgtgttctttcatgaatatcaaccagcagttgtttatcatttacctgacaaacaccccgagccacatgaccattttcagttaatgtattttcaatataataacctaccattgcataattatattttaccccatcgggatgatttaatagaaaatcatagatttgtttatacgctgtaactccgtaataatcatcagcattaatcactgcaaatggcccatctattaaatctttacaactccaaatcgcatgagcagttccccatggtttcacacgaccagctggtaatgaaaattccgctggaatattagccaaatcctgatatacgtatttaacattcatgatttgctccattctatctccaataacttctttaaactcttcttcgttttccttttttataataaatataacagtttcaaaacctgctcgtcgagcatcataaatcgaaaaatcaataattatatgaccatcctcatcaattggatcaatctgctttaatccgccataacgactccccatacctgctgccataattactaatactggtttattcatttttatcctccttttaaaagacccactttcaaagaaaatgagtctttcaattaaatatcaagccaacgcatttccattggtgctaatcttaatttttctcgtaaatttccttctacatatagatgggtatccagagcatctagtgagttattaataactacgatctttcctaccgcttcaaaagcagctacttcagcattgacattatctacatagtattttttcatttcatcttctttagctgccgcccaatagattgctcttaataataaacgacaattttgcggtgaataaggaagtccagctaaataaacactacgcccagcaccgtaagtatttgtaactaattgagcaaactctttatgttgacgaataatttgatagttttcaccatgtccataaatgctagccattccttcaccaaaatcaatttctccttcaatatcttcaacaataaaatgattaggatcaactgtattgtatttatcatgacttaatgtaaagccaacttccttatcaacaccaagaacatcacttaattgaaagaattttccctgatattgataagcggttggttctccaaccccgataaaaccgccaccattatctatccattttctaatggttgtaagaacctcttcatcaatccagttttctgctcctgaccatgatgtgtaagccgtaccggcattaataattactttaatatcaggattaattcctttttttatatcatcaaaattaataaactcaacatcgatcggcatcccgcttaaacattcaattatccctacataagaataaatttcacgataccagatagcatgatgaacctgattattcatccaacgtcgaatacttccccaacagtttagtattgccactttaaatggagaggtataggcttttgtttcttttgttaaatcatgaatttgtctaaattcatcaactacttgggtaattgtatcaacaaatcccggccattccactgccaatttcaaatatcctccataaccgattcgatctagcggacttcttaaaatagctcttcttgcttgtaaccagttatcttttgcttctttaatcggatcaccaccctcacagaaaacatcagggaagaaatatggtaaaaaacgcccttctgtataacgtacgcctttaatatcggaaatcattcgcatcgttacaccatttcctacagaaccaactacagcatccaaaccaattgtttcaaaatatttaccatacggttctgttccaatccaatgatcacccaaaaacatcatagcctctttaccataaccatgaacaatatcaactaattccttagctaatttacaaacctcaatttgttggaactcaataaaatctttaaattgttttgatggtactctaaataatgaattatgatatccttgatcaacaatatattcagcgcgccatttataacctgcccatttttcaaattgctctaaaatgtaaggactaacgcttgcactatatccaaaccattctacaaatttttctcttttttgatcatcaaatgttaaagtaaattgatgaaaaaaagtggtgaaacgaattacatcaacatgtttattttcttcacaaaatttccgtaatttatctttaacaaattccttggtcttaggttgacggacatcaaaggttaattgatgcggcgcatctttccaatcatttgtaataaaattatacatatgaacaggatcccaaattaaaaatgccaaaaaactcactgtatattcatgataaggtatagtcgaaattgttactgctccaacttctttattaaattcccattgatcaactgctactacttcaccagtagtacgatcaattacttcccaccagcgtttaggatcatcaatatcattaactttcagctgctgagtatgaaaacctttcattaactcaatcgttaaactagtatcacgagcagtataacggtccgttatcaaatattcttgttggatctcgtctggattagcttcagcccactcattatcttttcttgtagtataatatgttgcatatattttagcatccaaattcattaattcttgaggcatgtcggtcccatcacaatctcgaattgcatcagccccaagtttattttttaattcaatcgtttggtcaattacatctaaatcagtaggtaacgttaatctcccgtatttttccatgtctactctccttcaattatagcttcttcactgtctatgtcaaagaaatgcattttgtccatcttataagcaaatctcccaattaccccatttgtcagagttgttccgccaggggctttaacaataaacggtttttcatctttaaccatatggatataactttcagaacccataaattcaactacttctgctttcccctcaaaacaatcctcctgatgctcattaatgtagtcattatcaacactgatatcttccggccttattcccattattaccgtcttgcctaaatatcctttttctctaagctgcttagctctagttgattcaacctttaaactaacatcactcagttcaataataatagcaccgtccttttcattaattttaccatttaaaaaattcatttgtggactcccaataaaaccagcaacaaatttattgacgggatgattgtataaatatgctggtgatgctacttgttgaatccgaccatctttcatcacaacaattcttgttcccatcgtcatcgcttcagtttgatcgtgagtcacataaataaatgttgttcctaattgctgatataattttgaaatctctgttcgcatctgaactcttaatttagcatctaaattactcaatggctcatccattaaaaatacttttggttctcgaacgattgctcgccctaatgctacccgttgtctttgtccaccggataaagctttaggcttacgatctaaatattgttctatatctaaagctttagctgctttacgaaccttttgatcaatttcatcttttggcttttttgctatttttaaaccaaaagccatgttatcatatacactcatatgaggatataatgcatatgattgaaacaccattgcaatatctcgattttttggagccacatcattcatcaattttccatctatatatagctctcctgctgaaatttcttctaatcccgcaatcattctaagtgtagtactcttcccacaaccagaaggaccaacaaaaacaataaattccttatctgcgatttctagattaaaatcaaatacagcttgaacattattatcatatatcttatcaatatgttttaagcttaaattcgccatcttgtttctcctttacttatagcctttattatatgtgtaaattactccgatcaatccagctaagcccaccagttcagtcgctaatcctgtataaccaacatttttttgtccaataaaaatcaaagccattgaaactataaatacaacaaccatgataattattttagtttttccatccatagttttctcctctaatctttcaatccacccaaggtcattccttgtgtaagtttcttttgaactataatatatagaatcaacgttggcagcataactactactaatccagcatacatcataccatactcagccttcccccgggttgcctgcatcaaattcaacaatcctacaggtaatgtttttgaagtacttggtaataatgtcaaggcaataatatattcattccaaaatgctaaaaaattaaataaaattacagtaataatacttggttttgccatgggaatcattactctaaccattgttttataatatccacatccatctattaacgctgcttcttcataagcctttggtaaagtcttaaaataaccacttaataaataaacagtaaacggaatagctgtcgctgcgtatacaatagctaaaacaaaaatattatttaaaaagaaatttcctccgagtaattcataaataaaatcatcccaatctaataacattaaaaagataggtacaacaatataatttacattaataaataaccctgccataaataaggtgttaaaaaatcttcttcccttaaaattataacgcgccaatacatacgccgctggtaatgaaacgactaataaaatcaccagtgccatcgctgttgttaaaatagaattaagtaaatattctcccatattcgcttgttcaaatgcattaacaaagttttgcaaatagattcctgccggaatagaccagggatttccataaaactcagaattctctttgattgaagccataaatacccatgctaccggtacaataatagaaaccgcaagagtaatcaaagctacataaataaatattttataaagtttatcactgctaaataactttttcattttcctgctcctttctataactctaacgtatcacgctctgtagcacgattaataataaaactcaaaataaatgaaaaaataaaaactactgcggcaatcgccattccatatccatatgatgcgttgttataagcttgtttatataaataacttaagaccgtttcactagctccatcaggtccaccactagtcataactttaacaaataaaaaacttaagttaatcgtcgaaataataaagaaagttaaagttgttcggatattatcccaaatcaaaggtagtgtaattgaaaaaaattgtttgattttcccagctccatcaagtgctgaagcttcatacaagtgttcgggaatcgaactcatcgaagccatgtacataaccatataataacctatagcttgccatatcattgttcctatgatggcataaataacaatactttgatctccaagaaacttaacagtttcccagctttctggtttaaataacattaaaacactattgatcataccattttctgagggatcatagattgcagaaaaaatcgaagagataacgactactgataatatattaggaatataaaaaattacccgaaagaaattttgtccttttattttttctctaactaaaatcgaagcaaaaagaattgctacagccatcgtaattacagttacaaccgcaataatcaaaatggtattttgtaaagcacgaataaaattcatatcttgcattaataacacaaaattattaaatccaacaaaagtcttatcggctgatagcccgccccattttaatgttgacatccaaaagacattaagggtcggcaaaatcatgaacactccaaataagattaccgctggggcaaggcataaaataatgaatctgcgtctttcttttttcttattcattgctgcacctactttctaaaatagcggtggaatgacaccaccgctattattttatcaattattatttgtcgtattttttaacagcatcaatcacagcattataccattcatcaactgttttatctcctgttacaacagaattaactgttccataaagaataccttcagcactagttagatcaaccccttcaattgcatcaacagatttaaatccaaccgtacaactcttagccccattatcataaatttggtagaatagtgttttttgattatcaatttcattaccatctttatcttttactttttctggtaaatatgatgaagcagttgtagttggtaaaacgcatccagattcttcagcaaataattttgcagcttcgtcactgtacataaatgtaataaattttttagccaaatcagcatttttggcttttgaaggaatatatacttgttcagagaatgtagaagaatatgaatctccttctgcacttacttttggtaatgccataaatccccatttgaaaccttcagcacgtggtgcttcagacatttcatctggcaaccaagtaccatttggacagaataatgctttattatctaaaattaattgttgattttttgtgaaattatctttattagcatttgcaaccgtattagcttcagtatattgtgctaattttccgactatttcaaatgcttttttagtttcagcagattgccatgttttagtatcatattccattaacttagtataagcgtcagcacctacagtttcgtttaataacgctgagaaaaaagcatcaaaatatccagttgttggataagtgaataaagcaattccttctgcctttgctttttcacctaattcccacatctcatcccaagttgttggaactgtccaacctttttgttcaaataaaccagcattatagaataagccgcaaggatcataagtaaatggtgctaaatataattttccatcaccatatggtttagttgcaaatgaattagtaaatccagggataattttatctttaacttttacatcttcaccataaactttcatatctaaaacatcactgatttcagcgattgctttatcagaaatcattgtatctactaaaccaccttcagatcctactgataaataaatcaaatcaggtacatcttttcctgaagtaattaccggtcttaaagtttcagcaatatttttttctaaatttaattcaactttaaccccttcttttttttcaaaagccttaactacagcttcccatccttttgtcccataaccaccatttagtcccgaaatttttaaagtattggtgtcatctgatttcccgccaccacaaccagtcagcatccctgctgctaacgataatacaagggcagtacttaaaattttcttcataatattcgttttcctccttgtttattatgattaattacaactaaattatattttaatgtaagcgcttttactacgcgataattgcttacttttttatatatcttgctttattttattataaaaatataaaaatttatataaatttgacgttatattagttataataaactcgaggtgaaaattatgagcaatgaaagaattgaatttatcgaaaagccggcattaattaataatcaagctcgcttactatatgttagtagttcaaaatatgaaggtgactggcattctcagttacactcccatcactttactgaattattttatgtaactaaaggatgcggtggctttaaaatcggagcagacgaatttaatgttcaagaaaatgattttgttattatcaaccctaacacgatgcatactgaagtttctcgtgatcgaaatccattggaatatattgtaattgctattgatgggattagttttgaaatacctgaggatagtttaaaagattatattagctgtaattatgctaattataaaaatgagattcttttttacttaaatttaatggtaaaagaatcacaagctaagaatgaactatatgatgatatgtgccaacaactaatgcaagtcttactaataaatattttaagattaaatcgtattaatgtatctttaacacaaggtaagactattcgcaaggaaatctttatgatcaagaactacattgatcgtaattaccataaagaaataactttggatactttagctgaaaaaactcatatgaataaattctatcttgctcatgaatttaaaaatgatgtcggtgtttcaccaatcagctatctacttcagcgaagaatatatgagagcaaatatttacttagagataccgacctatcaatttcacagatttcaacaattcttggtttctcctcgctttcatattttgctcaagcatttaaaaaaagtacaaatttttctcctttacaatatcgtaaaaaccacaaaaaatataataaataaaaaagtgcttttgtagtgccccgaaaagttggacacgttaaattaaagttagatcttgaaaggattgttgtctatatacaagtggactcaatccttttctttttgtattgattctctcgttattataatattcgatatattcactcattgcagctttgaattgttcatgcaattttctttatcacttaaccatttttgataggctttatgctgtgacaatgtcattcttgatctaaatgaaagattaatcctttaaggtttgaataataattgcaaactaagatgttcagttttttattaatacatcgtcctatactggcagctaaagctactaaccgataattttctctgtttccaactctatttatcagttccattttttgttcgatggataaagtcagcttatatgttctaattttattccactcgttgagtcaaaaatccttatgacatacacccgatagatcttttagatattcccatccttatatttttaaatatattttaatttaaattttttactattccgtataaaaagtgacctcctttttgatgtgtaccttctttactggacaaaccagtaaggagggtacatatcattttgggggtcactacattttacacttttttaagattcttttctaataaacaaatacattccaccactaataatcaatgaagatactgttagtgcaatgactgcatcatcacctgtcttaactgatgtaattgacttatcagcaggtgtagatggtgtaataggatcgggcattggggctggtttagtctgttcttcttcattgccattaaccaatttatcacatttaatacttaactgcctaattaacggaccatatgtatatgcactaattgcccaagcacactgagacatcgcataaggattttcatctccacctacggattcagcaaatgatccatcactattttgaaatgtaagaagtgtatcatagggatttatattaacattattgttataatcaccattttttactccatcagcatcatattcaattaaaccaaataatactgaagcaacactacttgcgcttgaaattccttgtccatatgtataacaccagccaccatcttgattttgagttttcattaaccaatttactgacttattaattgaatttgtaatttcttgactgtttaatttcctgtttatagaagctagtgctgcaatagcccaaccagttacatccggactcttatcaccataagatatataggaaccagattcatcttgttgtccaattaaatacatagctgcagcttctttattgtactcagcattcgaagtttcaagaccaattaatgctaatgcttgttgtaaagctgtaggctgtaatccgttttcatccttaattactgcgccattttcccttacatatgtttctaacatactaactagattatagcttataccactgctatttgttacttgattagggttaataccaatacttattaaagctgcaatatccattcctaaattagatgcatattcatttttaaaatcataatcttttattttaaaaatatctacttgatcatcaccaaaaacttgcatgctacccaaacccagtgtcatatatcgataatcgagatatgcatctgaatttaaaaaactttcataattattttttaagtaagactgtagcatacctgcctcttgtccaaccgcgaacacatttgttatgctaataaacactaaagcaaaacttgttaataaacctaaaacttttttcttcattgatttccctccgttattccatattttatttttaccctttgtaagatctgaaacatcgtcttactaagtaaaaacataaaaattatatttgaaacaatatatattaacgtcgttggtaatgaagttaatactattgccaaatatcgtgttaaattaaaacttgtttcaaaagcaagaactgaccataaatccattaccatggaaaaagcaagtccacaaatagcactatatccatataataaaaatttatttttaaacaaatttttactaaaaattccagctccataaccaattattccccatgcgatcatttggaatggagtccatggtcctattccaaaaacaaagtctgataatgttgctgacaacgacccacacataaaaccagatgccggaccaaaaactatcccacaaataataaccattgcagttacaggtttaaaactgggtgttaacataaaaatcgttctagaaacaactgttagggcaatcattgttgccaaaaccacaacttcccttattttaggtttgctattttcatatttaaaataaaatggtaaacaagataatgcgaacgaagcaataataattaaattatatttttcacctttatataaaacagttcctaagatcgttattaaaacaataaccattaaaataaagatacttttttttattttcataaccctaaatcctctaataaaacaacttcagagttattatttcttactattttattaatcgttgtagtataaaataaattattactaaagaaatttcgcatcgagtctactgattccatttgtccattaaaaatcatagcaactcgatcacttattttagcgacaaattctaaatcatgactaacaacaattatcgtcatatgtttgcttaaactacgaatcaaactcgccaaattatctttgctcactgcatctattcctttagtaggttcatctaataacaacaattgcggtcttgtcagtaaaacttttcctaatgccaataattgcttttgaccaccgctcaaatcaaacgggtgcatatctcgtaaattactaattccaatattctccatttcaatttcaactgtttttaaattattttctactactaataattcatttataactttatcggttataaacaatgttgtgggatcctggggtaaataaccaattttttctacaactcctactttagttatattaccttgatacttaactaaccctgcgatacatttcaaaaatgatgatttcccactaccgttagctcctactactgataatatctcattttgtctaacatctaaatcaagattttctaaaaccgtactatcgtaggcaaagctcaaatcacgaattttcaataaaagtccagtatcgacaacctcctgctccttaatatcaaaatcatgatagtcttttagtacttcacgtgcttgttttacagttaaacaaagtgcattagctaatgttgaaactcgtacataattaggtaaagcagctacaaaaacatcctctgttaacatcttttttactgccttttcaatttgatcatcaataactttttggccatgatcaagcaaaatcaaacgatttgcaacatccaacaagccttctaattgatgttcaactaaaataatcgtaatatcaaaatcatcatttagctgttttaaaattctaataaattcatcacgattaactggatctaactgagccgtagcttcatcaagtaagataacactaggattcattaccattacactagctaaattaacaagttgtttttctccgccagataatgattgtgtatcattgttaataatattttgtaaattaaaataattaacaatttcacctactcgacgtttcatttgttttaaggggattgcctgattttcaagtccaaaagcaatttcatgccaaaccttatccataacaatttgatcatcagggttttgaaaaacaaagccaatctgaatatctttttttatttgttcgtctagttcaattgttccttcaagtgttcctgtcggttgtaaacttgattttaacaatctcaacaatgttgttttgccacaaccactctcgccacaaataacaacaaaatcccctttatttatttcaaaggaaaggttatcaatcactttttcattatcaggataagtaaaacatacattttttactttatacatttttctttcctcctaaataaattggtaataacattaatcctatataaactagcataaataaaccatcttgccattttaaataatacgtttgaacgataggataataataaaaattatgatataaactaaaataactatataaacaaattaatgttaaaatgataatcacaaataattttaatttatcgtctcttctaaatttatacaaatgaaaacttgttcttttaccatctccatatcctctagcttgcattgaattcatcatatctagcgaagattcaaaagcataggtaactaatacaactatcagatttcggtagtaacccaacttattttgattgggcatatttatattagcttctttgatttttcgatattgtaacctcaacttactaataatgttaaagctcattgaaatcactagccctaaggttggcaaaattgagccaaatagataaactatgtggctatctgttaaacatgttttcattacacgaaaccataacaacatactacttaataataaaccaaatacaaaaccataaattaatgcttgacttgttattgttacataatcattttggtatacaatatttgttccttctgtcacaaataaaggattagtaattgttacaataataattaaaattattgtatatttaatatctttaaaaaataattttgcgttaaaataataatccataattaaggcacatattataactaaaacaattatataataattctgttgaataattgacactatcataactgaaagaaaataagcaaataatactagcggatgactacttctaaatggttttaagaccatgataaatccttcccataatcacatgtaaacatccatttgactgcatcaccatcttttaacttttttcccccagcaccgacatttacatatttaccattaacactatacatccaaccacttttttctccaacacaaaattgcggaatatccttaatactactaacataaccactatttgcgaccaattttaattctttctctccattaatctgtcttaataattctaaaactgtagtattctttttcaccttatataccgtatttggtaaaataattccagaagaaggaatattaatattatatttatatccatcactaattttatccatattatttaaaattgttttacaatcaattgaaatgctaacattaatcatttgattatcattatcagctggcttattatttggagaattatctttattaccagcatcagtattagcaccatcattagatgtctgattagaatctaaagcagaactatttgttcccttattatgctcatcaccagcatctgtagcgctatctgtctgactattttcacttatgactgttacattaccagctgcatcaattgttgctgtcacctcattagcccattgttgttcagttgattctgttttggttttcacaatattattgccctttgttactgttccacatccagtcaataaaaccaagataaatactaatgaaatttttaaatattttgacataataaaagaccctttctaaaaaatggcgcacaaaaggatcacgtttatgtagaactactctatcgtccgtaaagtgtatcctaagataatggcaagtattccggcttagattcatcgtcttaacaccttcccagttttcaccagtggtctatcgtcttaactcctcattacggcggcgggaccgctcttgcttctaacaagattccttattaatgtacaacaaccattaaatatgcgttattaaattactttaattatacaataaagaatcaaaaatggaagttaaacttccatttttcgactaatgatctgatttaaaatactagatctttaattttattatctcctgccagcattattggatgaataaaaataacctcatcatctttataaactattttcttcaatctaatttaaataatctctaaataactcatcttgataattttaccgcattgtattagctacataacttgcatcttttgtttattgatcatacggtgtgacaagtgatacttttcttaaccttgcttgatatttgatttaattactgtttagccatgttacttcatgaatttaatgttgtatattaaattcaataatataatattctaattaacaattcttttagtgtcgagattggaagtatacctaccttatcagctcctaaatctttttagatttaaagcctttttcttaacaatcataaaaccatctctttttattctatcaatactgtaaaaaatcctttaatacaattttaaatatgaatttacgacatttttttaagcgtttgcccataatcagttacccattactcctccggcaatgagattctaaacagcttaatatccacttcataacagcagtacatattatttctgatacgtgaaccaacatcgttacaaaaagcaataattttctagtcacagacttacatatctcaatatgatcttagacaaccctgccaacgttataaacaccttctgttcatagcgcagataaaactctcctaaaaaattgtctggtagtttaattatcattttccgtaataattaattttttctccataaaaaaaggttaaattgaaaatttttttcaatttaaccttactcttataactctttttttcttgccactaccataaaacgatgagtcgttaattcaaaatatttcttatctttgatctgtttcaacacatgactataaaaattcataaaacgatcttgagtaatatcagctttagtgattcctttcatgaactgaataaatgatgccagcgtgtcaaaacgaacatacccatgttcttccacactatcaataatctccaaaccaatgtcactcaatgtctgacaactagcctcacgatcccaacgaccatgtaacttaaaaggtaagaaaatattgatcaattctttataattatcactacccatttgattaacaataatatacccacctggttttacgacccgatacaaatcatacttatcataattagataattcattaacaatgacatcgattcgctcatctttaaatggtaatttcccttcatttgttaattttgttactttaacattgcgatcagctaatttttcttcagctttttcatattgagcttctacaacatatgtaagtggtggtaaatgttcaaaagcagcaacatattctcccccatcaaatgagatagtcgctaaatgagtgtcatcattaaaataacgggcggcaatctcatggcttgaataagttggtaaactttgctgtaccagcgcattagctgtttcattcatcgctttggcaatttctgatttcatcaataaagcctcattgattttcttcctaaaacggattttattgtaataaaatccaatatactggctaatcccatcacaaataactccaactgcgataaatcctaacatttcaacaaaccattcagttgtaaacatcgcctgaactgacgcaatagcatagcatatcacacacataaagataatactttttgttcgagtatacttaaacggttcatttaatttagtataccagcttaaaatacttttcttttgtgccgttctaccttctaactcacaaaaaatcaatttgattgctgtcaacattactgccaacgaaataagcatgtaaatataatattccatttctttacctcttataaattttctcgcctttcaatgaataataagcatcaccatcaactgttacaaaataccctttttcattgaattctaaatcaccttcaactgagaaaaccacttcattttcattcatatcataaatataactgcttccactcttgttgaagataccataaactacatcattatacacaaaggttgtcccttcgtccataaaatagtcattaattactttatttccttctacatcaaatacttcatacttactgccagtagtatatccagcataatatttttcacctaaatacataattcgtacatattgttcagatacttttttgcctttattattaattaaataatatttatcttcttttttagaaacgacagcaagattattttcatcaaaagcttcagcactcttataagattcctttattgcttccttaccatcaaaaccataatattggtaaccttcatcacgcacatacaccgggaaaatcttactctttgtaaatgatgccattgggtctaactgaatcccatttacctctatttctttaccgtcattaacgaatttatgtggtccgtaaatcatttctttattctttacaacataatttttatagttacgatagtaactgtttgatgttactgtttcaccatctttgttaaataaatatgtagtttgattttttactccaataatattttttgaattatcataatataaatcatctaattcaagtgttgtagtaaaaattatttttccttctaaatccaatgcattgatctcatgagttttacgattataaagcaaataaccttttttactactatgatccatcaactgattattgccaccaatcttgattccttcaatatgcttttcattaactaaattgtaaatagatgaggttttttcaaaattaataaccgcataatcactatcaactgtatatgcacttataatcttctccttactcttttttaatacctcaccatcattatataaaacaatatattctttaccttgatgaataaccggtaacccgaataaagaaatctctgtctttttatcttccttgtataattcttttccttcaccatctaaaatactaattttttcattcttatcataaccaacaatcatatttccaattgattctagtttatcatattttcctaatttgattgcttcttcaccatcatgaagaagatatccatactttttatccttaattacaatataaccagaacttccaacttcttcatacttatcataaataaattcagtctgcttatcaccttcataatccataagcgcatatttttctttattattagctacaaacaatgtttgatcgttatctatatttgaacatcctgttagcattaaaaatgctaataaaccagctgtaatttttttcatttttttcactccttcaaaacaaaataattatagcatgttttttgtcgataaaccacaaacctttgatgataataaaacaaaaaacgataatctaaattatcgtttcttgctttggatatatttttggatattatattaagactactcaataactaatggttcttcgttatttacagatttaccatcttttgtagtcgcaacgtaataaactgatgaagtttctggtgtataatatatttgcaacgtatcaacagttgaaattttaactccctgtgatttaacgtcctcttttaccaatttttcaatatcagttgctgttacgtttttcccatgatattgtacttctacgattgctttcatctttaaataattcccccgtttcttcttgaatcaataatatcatattcaagccaaatatgcaaattttatagtgttaatcatcattttttaagaattaacgataaaaatattatctttttttagaaaattcctacaaagtttgtctaacaaaattgaataaaaaagaaaaaacagaaaatcgaaatttcctgctttatgaattattttgttttaaacggttttgttgtttacgtgcttgttctgttaaataacgttttctcaaacgaatgttttcaggtgttacttcaactaattcatcatcattaatataatctaagcaagcttctaagttaaatgtccgaggtctttttaaaacaactgttgagtcttttgatgaagaacgggtatttgttagttgtttaccttttgtaacattaactactaaatcattgtcacgactatgttcaccaacgatcatcccttcataaacatcaacaccaggaccaataaacataactccacgatcttcaaccccacctaaagcataggctgtagtttgaccattatctatcgaaactaaaacaccaagtgatctttctccaactgattcaccttccattgggcgatattctaagaatgaatgagaaataattccataaccttttgtcattgttaaaaagtttgtcataaaaccaatcatccctcttgaaggaattgtatatgtgacacttgtttgtccttcattactaaccatattttcaagtacacctcgacgatatcctaatgattctataacattaccaatacagtcatcgggtgcttcaatattaacttcttcatatggttcacaaagtacaccgtcaatctctttaataattacttttggtttagaaacttgaagttcatatccttcgcgacgcatattttcaattaatatcgacaaatgcaactctccccgtccagaaacgatccattcttcactgttaggaattctttcaatctttaaagatacatcacggttagtttctttaaataaacgttcttcaatttgacgagctgttacaaattttccatcttgacctgcaaatggcgaagtattagtaccaaaaaccatttgaatagttggttcatctacttttaataatggtaaagcttcttcttttcccgtagtacatacagtctcaccaacaccgatatcagctaaaccagcaatcgccacaatatctccagcccctgcttcttcaatttcaattcgatgcaagccaataaaaccaaataatttttggattctaaattgactgtgtgaaccatcagcacgaacacaagttacgctttcattaactcgtattttaccacgttgaattcgtccaacaccgattcttcccacataatcattataatctaataaagccggctggaattgtaatggtccttcttcatcaactaatggttctggaatctcatcaatgatcatatcaaacaaacagtccatacttggttcttgagttgataaatcagggtccaaactagaagttccttgtaatgctgaagcatagacagtcgggaattctaactgatcatcatcagctcctaattccataaataattctaatacttcatccattacttcctgaattcttactactggacgatctactttattaattactacgattggttttactttagctgctaatgctttctttaaaacaaaacgtgtttgaggcattgttccctcataagcatcgaccactaataataccccatcaaccatattcatgattctttcaacttcaccaccgaaatcggcatgaccaggagtatccataatattgatgcgataatccttataattgatggctgtatttttagccaatatagtaattccacgctcacgttcaatggcattactatccattgcacgttctgctatttgttcattatctctaaatgtacccgataattttaataattgatctacaagtgttgttttaccgtgatcgacatgggcaataatcgcaatatttcttatcttcatttactcaacctctcttataacttcatcattatatcacagaattgtattttgtcattattttttttaattgatataaaaatgggcttaaatagcccttaatttcattttttgtcattgaattcaatcaacgatgattcccaataaactagctaaagcgattgcctgatacatatcaacatggattccttttaaactataatcatcgattctaattccctcaatattagtggtcttaaagtccatcccttttaagcttgttttaaatacctctccagcaataaaactaacttgtttaaaaacaagatttttaacattcacttccataaaactactttcatctaatgtactatcattaaactcaacacaacgaatatttccaagactaatatccatatagcgtccttgtactccctcaaataaaagatcttgtaaagaacagtcaataaaatttagccctgtcatcttacagttaataaagtgacaacgatggatactaaccttattaaattctaaatttgataaatcacagttttcaaaaatacaatctgttatatgagtattaactaattcgatcatattaaaatcaatcttaataaatttacattcctcaatcgttaaatttttaattggaataacttgttgaggattttcattaaataaacactgataataattatcttctatttcatgaaatgaacacttatttaaatcatgaattaccggctctcttcttttcatcttacacctcacctgattattataagcatagcttatctttattgtaaagattctttgtatatcattttaaactcccagcaaattgtagtatcctataagtataaggaggtggtttaatgaaactagttgaattaattacaacacctgaatgtcagcatatttaccagcgttattttaagattgttgccacccctaaaccaccgcatcaaattacctcaaaacagatttatcaagagatcgtagcatactacaatggcagtattcaaaatgttttagatattttatgttatgacgaaatcgttttcttacaaaattttgaaaaaaccaaaagttatcgtaaagatatccctacaatcaatacattgatcaacaaatgcttactaattaaaaatcctaataataataactatttagaaatccctgaagacataaagataaatgttattaatgctgtagaacaagcggatattgacaaggtcattcaaatagatcaaatcaatgaattattgattggtattctagccattagaggtattattgaaccacaagaattagtaaatatttatcatagttatgatccttcactttcacgtaatgaagtaaacactcatttagatacaaatcactatctatttcagcattactttatttatcaaggggaaactgaattattattagcttatgagccatatcggccgattatccaaaaaattgaacagctccaaacattagtaaaaaaaactcctgcggcttataccgccaaacaattaagaacgatcgctaaatatggctttgacttaagtgaaccagccatcactaacctctatgaagcagtcgaacaaattgataatctttttgtaagagaattatttagagatagtattatgcttttttgtcaaattcatggtgaccttaacgatttgatttatatgattaatgaattaaaaattacaaataatcaagttattgaacatcttgaaaagaatttacgtgctgcagttcctttaattcatagtgctgctttttatggattatccccgtatgattactatttgacaatcaacaaagattcttatttcagtgagcaagagagttctaccttttatcagctgtatttaagtttattagagtatactaaccaagtttttaaaattacagatatttcaatgaaaaatcttgattatattgagcaagatgatttttctcaaattcgaaccttactatttgataatccaaatataatcgaccactatatcagtgaaaatcctgagcacctaaccaattatgaactgactattattaatgattttaaagctggctttattgatgactttttaattttaacaaatcttgatgactatacgctcgttagtaatgaaactggtgtttatgctatttatgggcttgttaatcatcttaaagaaatttatcctaattcaactttgccccaggtctgtaatttagcactgctcccctatcgacacaagattgtatttgatggattgttagaagatcgccagtctattttacctcataaacaaattcgtacatacagccatgacgatataatctacgaacttccgcatacgctcttaaactaaaaaacccataacgggttttttattcattaatgattcgattactagctaaataagtcgctaaataataacctccatatacaattacaataaagatcgtcgtaaccaagatgttatcagcgatattaatgctgaccatcaaactaataatataatttatttcttttagtgcaacaaaactatgaattaaagctacgattaatggaaacataaatgtgattccaatttgaactaaaaggcttctatttaccattggtttacttgcacctaactgtcctaagatacgataacgttctttattatcagaagattctgataattgttcaattgctaacacagtaccacttgcaagtgcaaatacaattcctaaatacagtccaacaaaagtaaacaaagcactcgttccaattcccgattgccctaatccaatccgggtaaaactaataactgttggactgctttcagtccttaactgttcattaaaagatttaagcaaatcttggaattgttcctcacattcttccttatcaccttgatagtctgccactagataagttaaataactttcttgttcttccacatatttatttgcaatctggtcatttacaacaacaaacccttcattgccgctatcgttagtaattgccaattctactgcttgatccgtattactttgaagcgtagtatctcctattttgattgtactatcgccagctagaaacttattataatattcaagtgctacaggataagttgccactaattcatattgattattagccaattgtattttttgatcttctttaccatttaattccatgattttattaaaatcactttctttgattacccgcatcggttgattttttactgcttctatattagtataagcattatcttttgaatcaataaaaataccttgttttaatccttgtaaattaagataattgaactgataatcctctttgatgatttgttgatacaccgattcctgtttaaatctttcaataatttcagtattactagaaaatacagtaacatcacttgggctatttccctcataagtagtgttcattgctgaggccatcgctaaagacgatgataatatcccgatcgttaacaataacattaaggaaataactgttgtagaaataacatgtgtattaatcttattatttacttgttttaatacaaacatattcagaccattataataagtctttttgcgcatttgaacaacttttaataaaaaacctgatactgataagaaaaacaagaaagttccaatcgtccccagaataatcatgatcaaaaaatcagaacccacaacatataaagcgccatcatacaataacttatatgcgtacccaatcaaaacaatagagataataaaaataataaaaattaaccagccattttttattttaaccttttcatttttgtgatttgcatataataaatcaatcaacttaaatcgatttagtgtgataatattgaaaatcattacaataatataaataaatccaaaattaataatcgctgataaaagtgctccactagaaaaaacaaatgtaaatttggtcatatcagcttcaaacaattttgcagtaaaaattgataacaattgagataagccaattcctaagagtaaaccgattcctaatgaaatcactccaacaataactgtttcaagtactaaaatcgtagatacttttaactttgacattcctaaagtcatataaataccgatttctttttttcggcgtttaattaagaaattatttgcataaacaattaaaaatcctaaaactaccgaaacaaaaaccgaaatatatgataaaacatttactaaagactgcacaatttccattgttgatttgctaattgacatcattgctgtttgactatcaatcgaattaaagatataaaatatagcaacagcaataactagtgtaataaaataaattgagtaatctcttatactctttttaatatttctaagtgctaaactaaataacttcatttagttcaccacctaataatgtttgaacatccataatactattaaagaacattttacgagaattatcacctttaacaatttcgttaaagattttaccatctttgataaagattactcgatcagcataactagctgtaaatgaatcatgagtaaccatcaaaattgttgcattcaatttttcatttaacgcattcaaactatctaataacattcttgctgatttactatcaagagctccagttggttcatccgctaaaatcaaatcaggattagtaacgatagctctagcacaagcaactctttgtttttgaccaccagataattcatatggatactttgataaaatttctttgattcctaaagctgctgcaaccttgtttactttctcatctacttttttataatctgatttttgaatcgttaaagccaaagcaatattttcaaatgaagtcaatgtatctaaaagattaaaatcttgaaagataaagcctaacgaatcccttctaaactttgttaatttatatccctttagtttagtaatgtcagcatcctttaaataaatatgaccactagtaactttatcaatcgttgaaatacaatttagtaaagtacttttcccactaccactagcccccataatggctacaaactcaccaccgttaacatcgaaactaatattatcgacagcctttgtaatgttgtttttatttccataatatttttcaattttttcaattcttaaaattttttccatttctcttcacctcaacaactattatagccgtcataataatttctaccatcgaataaaataacataaccttacattattgtaaggttatgtgtgagctgtacggaaaaaccaaagttactaccgtaccatgtgaatttgaatctattttaatttcatgatttaatcgataacataattttttacataaatataaaccaattcccgtactcttttgtttagttcgtcccgttgttcccgtaaatcctttatcaaaaacacgattcaattcattttctaaaattccaattccattatcttttatcattaattcaacacgatctttatattgttttgcaaatagtttaattattggtgtttcatcaacatatttaattgcattattaataatctgatttaaaatgaactctaaccattttttatcactagcaacatctatttcaagattctctaattcaattttaacatgtttattgattaaatcttttttattacgtttaattactgaattaactaattcactaagtttaacatctttaattaaatagtctttttcaacattctcacttcgagcataaaagagtacttgttcaacataattatctatctttatgagttcttctttaatactctcattaactggatttagattattttcaataatcatttgacttgtagctacaggtgtttttacttcatgacaccacatctcaatatactctttgagttcactttgtcgataaattgcatcatttaaatgttctttcattgatttatcaatttcataaatacagttaaccataattttaccatctagaaaatgaggatttccaatcaattcagtaataagatacttttcatcaagatgatctaagattcctatcaaattattataaaaatttctacgccgaaaaaaattatacattaatactactacaaatgagctaatgagcagaagtggaatgtagactactaaaaaagttggacaattaaaaactgccaaaatcaacattaccaaacaagtcacagaaatcattactgtaaccgtaatgatttcatcttttaaataatcaaataatctcataaaatgatatacccctgaccacgtctagtatgaattacatcatttaaaccaatatcctctaactttttacgtaagcgattaatattaacagtcaatgtattatcatccacaaacatatcactatcccataaatatgccattaattcttctcgagatttaattttcccacggtgcagtaataaaaagtaaaatatttttaactcattttttgataattcaatcactttatttttatcaataatactacttttagatacatctaattttatcttttcataactaatcaaaacatcacttgtaggctgtgttcgttttaagaccgcttcgattcgggccaataaaattaatggattatacggtttcgtgacaaaatcatcagcaccataattaatacacatcaattcatccatctcattgttgcgactagttacaataataattggtttacttgaattcttacgatattctttgcataaaaactgtccatttacattgggaagattaatatccaataaaattaaatccccatcaaactgattcatttgttctaaagtattttcaaaagactcaattactttagtcaaatatccattattatttaaatatacttccagttcttggcgcaatttaacttcgtcttcaataatcaatatttctgccattattatgacctcctagatacaattatacacaagtataaaataatagcacttaagtgcactgtttcgtagtaatgctaataattaccaatttaccattttctttaactggcgaaagattataaatagttttagccttaataatctgcttttcacaagttttaagtggatgataaagcgtctgttcttccccagtttcaacacacttttcaattgcctgatgaatttgcttttgaacatccaaatcgacgctccgatagtacgtactaagaaaattagtaacatttatatcatcaatatttaatatcttacggtatgcttcattaataaatagcagctggggctgagactcatatgtaaacatcaatattccatcattcaatttttccataacacgattatatgttaataatatgctatctaaacgattaaaaattttctctttatttaaatagacatttatcccctttactaattcttgtaatgcccaaagttcatcatcgcgccattgtcgataatcatttatcattgtaaaaacaatacacccgataaattcaccaatatcatcgtttagactaatgataacaagtgtctttacttgattatcaaagaaatttttattaatttgtttactaaattgattaccttcatttttattaacaacaattatttgatgctccttaaaatatgtgactatttcttgaagctctgtcctcactattgggaaagtatcactaatctcaagctcaatcgactcatcttgccatgcatagacagaacgataattgtttccttcttctagtaataacgtaatccgatcaagtaaaaaatcatccccgatctctgccaaaatatggttgattgatgaatcaaaatcagttgactgctccattactgataaaacattcatcatttgttcattaagcttttcatctgaaataacacgacttacaccaatacatatttttggtttgttatcttcatcataaattattcttcctgtatctttaacccaagtataaccagaaccatggttaatcataaaacgtcgatagataaccttaaattcctgattaccattgaaaacagtctgatatctttttacatcttttgaatgtacgattctaccaatacttacattgtaaagataattgggaatttccatcttagctaaattagaaccattttcctttgttggagtatcaaaaacaatcatattatcacgcttaaaatcatattcgaaaacttgagcatttaattctaatagtgcctgtcgataccaatctacttccccttgctgataaacagtcgttaaaatatcatcaatattaactattgcactatcctcatctttagtatcacctactccgatgacaccattttcaaccatataagcaatttttgaagcactagctggtttagcaaaacgatacccttgagcacgattacaacctagttctactaaaaaatcttcttggcgtttggtttctactccttcagcaattacttccatattaaggcgtttcgccatttgaatcactgattttaaaatcttttcagctttattatttttatcaaaatgttccaaaaacgccaaatcaattttaattatatcaaacggcaattcctttaagatattcaacgatgaaaaaccactaccaaaatcatccattaaaatagtgaagccaagttcctttaactttactacagcctcaatcatttgattactatcctgcatatatgccgtttcagtaatttctaattgaaataactcaatcgacagctcatattccgctaaaagttttaagatagtatttcctaattccggatcatataattcaattcgagaaacatttacagatacaggtaataagacatgtcctttttggcgggcaataaccatatcttgacatactttacgccaaattacccgatctgctttagaaataaaaccattcttttcaaaaactggaataaaggtacttggtaacaccattcctcgagtcggactctgccaacgcatcaatgcctcataaccaatatatgtcctcgttaccatattaaatttgggttgataataaggaataaattcatcattttcaaatgcacgatccatttcatcaataattctctgttcttctaaaacttgatctcgaagttcatcatcataagttgcatagctggtattgtatttatcttttactttttttatcgccatcattgcccgatcacacatattattgactggtaatgatagatcatcaatattataataaccaaaactgactacaaccttgattccaagatcaaagttaccaatgtcttcattcatttgttgaagcaacaggtcttcaatattcgcttgatgaggaactacgattgcaaataaatccccacttaaacgtccaattaatccgccaagtttcttcatccgcttaactcccgtgttagcaatataaatcaatagttcatcaccgacactactaccataaatatcattaataatcttaaatcgatcaatatcaaaacaagcaagatcataattaatatcttggttttgcgtaattaattttttagcttcgcgataaaaagcagtacggttatagatcttggttaaagtatcaaaatcagccattattctatattcattatcttcggcccgacgaattgcattattgattcgtaatttaataattgcttcattataaggcttaacaattacctcactaactcctaaatttaataaattaagaagatttcccgtaaagttcccacctacgattaaagggatttgaatattatcaatatttttataactagaatactttgcgacattaacttcagtcgcatcatctaagtccataataatagcaacgattcgattatcattaagggtatcaataatattttcaagttcactacatataacaatatgatagtcactacttaaaaactcctttaatcttaaacaatcatcactatcttttataacgatgataattgtatccataatatcttcctccccaaatcaaccattagtagtattctagcatcattgttgtaattaaacaatctattagctatccccattttctaattcaatctatcagtttttctttgattacccctgtataggcccgatatccatcatcattaatgtgaagaccatcaagataataattttcaactggttggccctttttattgcaaagtgccataaaaggattaatcaaagtaacataatcatacggaataatatttttatactctttaaagaccatctttaaggtatcattactgcgtaatccttgctttgttgctttataaccatgaagcatttctaaacatggtaatggtgctacaagataaattttagtatccaaacaattataatgaataatttcgattgtttctttaacatttaaagcaatatcacgggggctctccatgaccgtattaccaagatcatttgttccaatcatcaaaaccacgtttttaggttgatatttgataaccccttcgtcgatgaaatttaaaagcattcctgaagtaatccccgctattccacaattatatttagtctctatctcaggataatacttgtccagatcacaatactcagtaattgaatccccataaaaaacagttcctccaggagttatatttttattttgattaataatttctaacattcttattaaagtaaattctcttaactgataatggttagttaaatatttcatattttctttcacacttatttcctcctgaacatattttagcatataaaaaaagaaaagccttaagcttttcctcctaattcataaatttgtttattttctaatttaatcacccgatcacatcccgtcaatgaagaaggtcgatgtgacacaattaaccatgtcttattttcaaattgttcagccaatgtcttcaataaacctttttcattaataacatctaaactacttgttggttcatccatgactaaaaaatcaggatcaactaataaaacccgtgcaattccaattctttgcttctcaccacctgacaatcgattctgaagttctcccatcatagtatcgtattgttctggtaaactaatgatcaattcatgaattcctgccatttgagcagcctttacgatttcttcttttgtcgcctttggttttcctaaagcaatattagcagcaatagaatcattaaaaagaaaagtgtcttgttcaagtgttccaattcgttgacgtaaatcttgcaaagagtattctttgatatctataccattaattaaaatttgaccacttgtaacatcataaaaacgtaataacaatctaatcaaagttgatttgccaattccactttctccaacaagaccaattttatctttaaaattaatggtaagattcatattttcaataatttttctattaatttcaggatagctaaaacttacattaataaattcaattttgtcgatatttttcaattctttaggctcaacaatttcatttacgacgggaaccatatcttccaaatcaaaatagcgttgtgccgccgcataagtttcaagtaaacttgaaactacagtcgttaatgattgcgtcgatgaaaatgaagccgaaactaaaaatgataagataataattccggttgtatcaatatttccttttaaagcaagatatgaagctactgcaattacagcaattcgagcaagataaatgaaaaacgttggcgtggaaacaactaattggcggtgataagcaagttgatgaattgaacgatttatattgcgattaacagcttctaattcttcattacgacgttttccataatcaaaaatttgaatttctgataatccatatacactatctaataaaaatatttttaattctcctaacttttgacgataaccaattcctatattacgacccagtttaatggctaaaataggaataataacactaataattaaatagattggtaacagtgcatagacaaagagcatatcaatacttcctgcaataatcaaagtcactaacggaagtaaaataacggtaaataatggcccaatcgtatgtgcaaagaaaaattcaatactttcgatatcagcaattgcaattgccatgatatcgccattattccgtccgatcaaactccctggtgccaacttgcgtaaagttccaaacatgtcaactcgcattttagctaataattcatacgaaccagcatgtgaaaaatatccttcaagataacgacaagtaacaattaaaattccacttataatcattaaaatacaatatgtgacgctattggcatattttaactttccggcaacactcaaaataaaagcagctccaaatcccattagccccatttgagaaatatttccaattatactgacaattgtagaaataacaaagaatttttttaatgtggcagcaattttcaataatcgtttggttaaggttaataatgattgtttatgttccataatctatcctacctttcccgctgcttctaaagcttcttgttcttttaccaactgataatattcaccatgatattttaataatgcttgatgattcccttgttcaactaatcttccttgatttaacacaatgatattatcagcacgttgaattgtcgataagcggtgagaaataataattaatgttctagttaaaccaagctcattaatacattgccaaatctcatcttcactatcacgatcaacacttgaagttgcttcatcaaaaattaaatatggagcaccacttaatagagctctggcgattccaatcttttgacgctgcccgccagataatttagcaccactatcacccaaatctgtcgataagccttctggcaaactttgcaaccattgatataaatgcacttgttttaaaacgtttaataattcacttgttgaagcatttggtgcagccagtttcaaattttcttctaatgaaccactaaaaatactaacccgttgtggtaccataacaatattttttctaacttcttcaggcgttaaactaaaataactttgaccatcaagaaataaatagccttgatctgggtcaataaaacgcattagcatacttgccaacgtactttttccacaaccactcttacctacaattgcagttgttttaccttttggtatttcaatacttaactgctttaaaacttggcgcctttgatgataattaaaaacaatatcttttactatgatccccgaataatcctgcaaataagctaaagtatcctgactgtatttaaccgctatttcgtgagctgtttcagcctcactcttatgaattcttgaagcatctaaatttaatatttcatctacttttattgttgccgcaatccctgataaagcatcatgagtcgcagacatcaattgtctaattgaactaaaaaaactatatgacaacattaacaataaaactgcctgtgctaaatcaatcgttcctttagccaattgtgaacagccaattactactgccagaataacacctaaataaattaatccatctgaaaccaaaaatgatgaaaagttcattttcataatcgacattgtactttgattaaatgtatccgcttttcgcctcaaattatcatgtctacgtcgatcttgattaaataatttcaaagtaaccaaactttttaagctttctaaataataacttgttaaatcttgaaaactagtccaatattctttctttaattgatcaatcatttttctaaaataattatttactaacggtaaacttaatgaaataatcagtagtattgtcgctactagcagcgaagtatcttttaactgaaaaaataaataaactggcgcaaagaaacaatacagcaaacttggtaaatacttagtgtaataaacctgcattagctccactccatcgccaacactactaattgtattacttgctccaatcctttcaattttaccaacatctaattgaagcattttttcaaaaatctctttacgcaaattaatccgtgctttggccccacagcgatattcggcttctccagttaatagatcagctattaaaatcaaacatgaagcaatcaatgcactgattattgctgccagcaactgctcttgtgacattttcggatgatataaatcacttaaaaaggatgaaatagttttagcaaacattactgttcctactaatgttaatattttaagtccggtaattattgcaatccaacctctaattccttcggacattctaattaatgttttatttattaacagcatagtacacctccaatgtacttatgttactcaagatttaatagtgtgtcaaactaaaaacaaatgtttcgaaaaaaactaggaaattttaaaatttcctagtttccagctaatataagctctattaaaatcatcagagccccttttttactaaaccataaatactcctttaggggcttgtttaatttattatttaatatgttccattttaataataatattgtttacattcattgaaccattacgaatcgccaagttaataataatcaaagaaattatgattattattaaagcaatgtatgaaatcacagtaataatcatacttattttatctacaaaaaatatgatagctataataagagaggaaataattaataaattttttagccatatttttaatcgattaatttgtttagtctgatattctatttcttcaaaatatgctttttttactctttgatccattttaagttctcctttttaatatgttaatcccgggttaaagaatccaaccaatactccaataagagcaataaccactaataataacattactttgattggtgacattttctttttagacaataaataccaacataataacacgaataaagcagttaaaaatccaggataaacaccatctaacgtcttttgtaaatctaaaaacggttctttagctccagcagcagtcatcgaaaaacttgtttttacactaacccatgtagctgctactgccccaatcacaataccacctaacattgtaattgattctcgtaaagcttctccttgaggtccaactagaaaatctacagctttaccacccaattcataacctttaaaatataataacttcattccaaaataagcaaataaattccaaacaataatatagaaaatagcccctaatggtgaaccacctgtagacattcccattgcaacccctaataaaataggaattatcgttccaactactaaagaatctcctattcctgctaacggtcccatcaatcctgcacgtaatccatttattgtttcatcatctacatcttcagcaccattagcacgagcctcctctaaccccgctgtcattccaacgatcacggaacctacttgcggttcggtgttaaaaaaggcagtatacgttttaatggcttttgcccgagcatcttttttatcatacaattcttcaacaattggtaacattgaacacaaatagccaaatgtttgcatatgttcttgagaaaaacatgttaaattcccataataccaattatgaaaagatttggttagggtcttttttgataatttcttttccatcttatatatcctcctcgtcatcatcaactacagcaactgcgactttaccaagtgtcaacattttaattcgataattgatcaatgcgaacattcccgcaacaacagttgcagaaactaagttaattcctaaagcagctgctaaagtaaaaccaaagaaaaatggaataaaatcaattgctttagtaacgatttgttttaataagattgcaattccgacacatggtaataatgaaccgactgtaaataatgttttcattgcaaccccatccattggtaaataggtttttatcaagtcaaccatcggagctcccattttacacatgatcatcgcaggaataaatgaacataaaatatgagaaatccaaggtaataccatatctactatatataattttttataatctccattttctactgcccgccagccaatatgctgccatgctagattaatcgttgcagtaccatagaataaaactgttcctaaagttccaaccattgttccaaatgatgttgcaagtgcagctccgtcacttgaggcagcatctagaccatagcttttaattgcaatcatagcaagtggaatccctatataacttactgcccgtacatcagccgaaactgttccccctggagtaacaagagcgatataaactacttgcattgcaatccctactaaaattccagtttgaatatcacctaaaataattccacaaactaaaccaccaactaaaggtcgacctaatgtgtagttaccaaatgatgttccccctaaacctggcatacttgataagcaagcaaataatccaagtaaggcggcttgaatccaacttatttccataataaaaatcccctttacatttatattttaataaccaaatttacttttgaaatcatcccatgtcccaatcgaaacgtctggtaataaagcaaattttattgtataaccagctttatggatacgttcaaacgcatcagcctccgcttgagtaattgactggttattacctaatttagtagccccttcacgatcattacaaggtcctacaataacagttttaacaccaggatcaaatccctgatctactaaaatcgtacacatatcaattggatttttagcaatcaagaaatattttgtgtcactatctaaaactttttgtgatttttttgcgaaatctgctaatgtccaaacaaatgttttcttaccacttgctgctttataggcagcttttaaaacatcattagttgctgctttatcatttacagcaattaatccatcacaaggatattctctagcccaacgcgtacaagtttgaccatgaatcatccgatcatcaattcttacaaatgaaactgacataatcttctcctcctaaatatcatcatcttcatcatttgtttctaaaacaaattgtttaattgcacctgttgcctcactcgtcacatttgtaattaaagcatcagtatctaaaacatctttcattaatattgttgttaaagctaatggtaaattcattcccccaagtactgtcgttttatcaatcaatcctgattgtgccaatacattcattgcagttgataaaggtgaaccacctatgatatcagctaaaacgataatttcactttctttaggaattttagtgattatctcagtaaagtctatagcaaactgatcagctgtaattccatcttttaatcctattgcaattacatcatcatgattacctgtaagcatttttaaagaatctagtaacccttcagcgaagttcccatgactaactaatattacatatttcatttttaacctccctttcttttgacatctatatcttatcaagtaacccctttcaatacatctgagcattgtcatttcttttcataaacaaatgtcatttttttaatgacatttgtcataataaaaaacgaatagtcatacttgctactcgtttaaataattagttatttctttttgtaaagcagttaatgaagtatctaaatccagattgttttgaagtgcttgattaatctgattatcagcaatcttcattgctgcctcatattttctaaatcgcgtatttgtggttggatactccattacctggcttaatacccgcatatcaattttactatcaccaagcgtatcttcctctaacaatttcaaaacctgtttagattcggtcacctcttttaatggagataccccttgactatattcataaatatcctgctgtgaagcttgactataagtaaattcttttaatagttgccaagctaactcaggagcactagttcgcatcgacatccccatcattaaagatgataattgtgttaaatgttgctcagaactttgaggcatttcaatcacatcccattcaaatgtagaatatttacttactcgataaggataaggcttatatgttcgatattgagaaaactgcattggtgcaaaagctactttgccttgatcgaaatcattggaagtaatattaaagccgcgatttaaagcattcagtttttcaataaattgaatagcactttttacttcgtgattattaaaatcacaggtcgttccagtttcattaaataactctattccactagcataaatagcgttgatccattcataattataacagccgtattgatcgatgattccgtcattattactatctttagtcaattgtcgacagacattataaaattcttctagcgaccaattgtcctttggaagactgattccttcttgttgtagcaatgttttatttacaaacattaaagtaggatttacttcataaggcaaagcatattgtttaccttgatactgtcctgcctgataagtactttgataaaattcatcactattaaaatcttgatcatcagtaatgatcgagtctaaattttttaatgcgcctaatgctgatagggaattaaaatcttcatttaaaatcatgtataaatcaggctcagcaccaattaataactgatttgataaccataaagaataatcttccttaagaattccacttttatattgaacttcaacattgggatgctctttttcaaaacggacaattattttatcaatcatttcataataatcgaacgtaggaacatcccaattacttcccgcaaatattccgattgttagaactttcttttgattgtggtaatatattaacccgattcccataactaaaactaagacaataatcattattttattctttttaatcatcgtcaagatcctttgttgtttgacctgtttggactgcccagatagctaactgagtacgatcacgaagttctagctttgataaaatagagcttaaataatttcgaacggttccttcagataaaaataatttttgagcaatttccttatttgataaaccaaaaccaacttgttgaattactttccattctggtttatttaattccctaacattatcatcattaacattgattgcataattagtatttgccatcttcgaaaaaagtctaaatacttttgtcgcaatatccggattgatcattgcacctccagaaacaacagttaaaatagcctgatacaatccatccattgatactccttttaaaaggtatccactagctccaaattttaatgcactaaaaacaaaatcatcatcatcaaatgttgtcaaaataattattttaacatccggataggcttctttaaccatctttgtgcaatataccccatccattcttggcattctaatatccattagaataacatctggaatatttcgttttagactgtctaatacaccaaaaccatcttctactgtatcgatcacttgtaaatcttcgtgtgtatttaaaacaattttcaatgattccctaattaattcttgatcatcagcgattaataccttaatcatatcgttccccctctttcattggaattgtaaccttaactgtaaaaccttctttactatagtattctaaacgtccatttaaaatagcagcccgttcttgcatttgttttaacccataacctaattttagatcatcgcagccaactccattatctgcaataacaatttctaaatcagataccctttggtaaatattgatttcaacctttttagctcgtccatgtcttaatgcatttgtaatactttcttgaacaattctaaaaataatatcttctttagtattttcaaaatcaactttatctaactgataatcaagcataatctcaacctctgaaacatcgctaaattctttaatcattttttgaattgcttcttttaatgtgtgctcttctaaagctccaggccgcaatttattaagtgaccgccggacatcactaatcccctcacggacaaccttagaaacaactaaaagctgttgtttagttacattaggatcgatatcaatcattgcaatacatgcatcaattccagctgcaattcctgtcaaagcatgaccgagtgtatcatgaatttctcgtgccagtcgttttctttcattactctcgccaattttttctgtcaccgcagcataatccttcaattgtttattaacttcgttgatcatagaaagttcttttgaaatattctcattttctctaatttgatttgcaatatagacaattaaaaacataataaacaagactaggtttgttgattcaagaatatttttagctattaaaatcgcagttttcgtcgcggcatcataaacctgtatatagctgtctaaagaaaccattggaattatattagaaataatgtcatagttagataacaaaaaaataattaaaataaacccgataataaccattgtattgcgcccatttttggtattaaaaattatatctgcaaacactaataaagctattccattatagcccatataaagattataaataatccagaaacataaaattatttctaatccattacaaatgactcgtccatttcgaacttgaaaattctcagattttctaatgaacataatcattaccaacaatgcaaatcctataattgaataaataaatactttagtcggattctttggtaaatatgctaatgtatctaaaaaatcgcgccccatcaaattattacaaacatattttgttgaaaataaaataatactagcttcaaataaaataataataaaattgattatgatcatcatatttttaattgacgatacagagcgatactcactgtattgcatcattgccaccccgttaactcaaagttagaaatattatcacggctaatcaactctactggtacttctattttcttttcaatcttcttattttctaataacgctttcgctttttgataagctaactgtcccattttgacaggtgattgagctgctgttgcctgaatcagtccagtattgatcaattctttaacatcaggcgaaccatcgactccataaactaaaacattatctatttccattgattcaatcgctgccaatgctcctaaagcactacgatcatttaatgccataacaacatctacatcaggagtttcttttagcatctgtttcatcgttggcattgcaatctcaatttgaccatcacagtcagcacgatttataacttgataattagcattactagcaatagtatcaagaaatccctgaatacgttctaccgcagactttgcagtagcatgctctaataaaataatcttagcatgatctcgtttactcatcatatcttttgcacataaaacacctgcatcataattgttagaagcaattgaacaatttactaatgactcatcataaataggggcatcaactacaataaccggaatcttagctttttttgctgcttttaatccaatttctatttttttagcatcaatcggattaacaaaaatcgcatcaacacgctggtcaatcaaatctaatatttgttcattctgcttatcaacatctaaaattggatcaagtgtaatcaagacatctccattcgcttcaaccgctttttttatctcattattaatcacttcaaaaaatggattattcatcgtcatataggttgccccaaaacgctgttgtcctactgttgctttaaaatctggataactataaaatccaaaaatcatcaacgtaatacagaggcaaagaaataccatcattttaacaattgttttttgattatttttgatttccataaattccccctatttctttatacattacatttgtaattatatagtaactgctttcatcacaattttaaagtgacaaatgtcatactaagaaaataaaaaagtcgtaacctagtcacgacctcttcagatacctaaactatctgataactatttagctcatagtaagtacattgaatttctgtgtcaatagatatttcaaggttgctactatgatcatatatacgtgttgtaagtgcatattctccatcattgaaaaatatttctaatgatgaagtatcactataaatcgtcatatttgatagatcatcaataacgatatgtcgtgaatcacgaccataaccacttgcacccattgaaaatgtcaacaaattactgtgataatcaataactgcatcatttcgtaatgttagagtaaaatcacgattatttatcggtaaatataactcatatatattgcctttacaagatattttttcatgattagacaaattaattatttctttagcttttctcaacgatttagtttcacttattggtaattgatatactttattatttttaaaggttagctcacgtggaagcgtaaaagcgtgttgccaattatatttggttgttggattcgtataagggacatcgggcatccccatccagccaataataatagttcttccttgctcatcaataaataattgtggagcataataatcaaagccatgatcaaattcaataaattcacttaatctataatctttttcaagatcaccgttgattaaataataaccgttctgatatagattctcataatcataacctgctgtttctactccttgcggacagcaaaataaaatcatctgctcatcaaatttaactagattagggcattcccacatatagccaaatggttcattagaaataatgcgattaactagtttgtaattaaccagatcatcacttcgatataataaacaacagccaacatcttgatttgttctagctcctaaaatcatataataatgatcaccatttttaataatttgcggatctcgaacatgcaaagtcaagtcatctggataatcgtcatttttcattagacatactttttcaccaaaattaattccatcatcacttataaccataattgtattatggtcacgaccagtatgaatataatcatgtttcccaggatattttacgttaccggtatagtaaacatacattttattatccttgattattgttgagccagaataagcacctccagcatctaaagaacaatcaggaaacagggcaacaggttcatttttaaaagtaataaaatcctttgtactataatgtccccaatatttatcacctccaaagcaatcgtctggtgcatattgatagtaaagatgataaatcccttcaaactgacataatccattaggatcatttaaccatccagtaggtggcattaaatgataattaaggcgatattcatcattacttgcttgtttttctaattttttgatttgttcattatttaaacaggtcataactatttctcctagtctaatttgattatatcttgatttaaactacatgttccaagattaataatttcaaattgattttgacttgtaataactaatggtgtcgcaattggacatcctgctgcttcaaccatcgcaaaatcaatttccattaatttatcaccttgttttactttttgaccttcagtaacaaataaattaaatggttttccttcaagttttacagtatccaaacctacatgaataagaatttcaattccatcattacttttaattcctaaagcatgctttgtaggaaagatcattgtaatttcaccatcaatcggagctgctaaaatattttctgtaggaaagataactaccccatcacccatcattttttgtgcaaaaatctcatctggtgcttccgttattgaagctactttcccagctagcggtgcagtgataatgtttgtttttacttctttagcttcagttggcagttcactatcttgagtaggttgtttagccatatcacgtttatataatataattgttaaaacaaatgacactgcaatacttaagaccatcccaattgcaaaattcaaataattcttaggatcgattgataagaaacctggtatacctgctgcacctaaagcattagcaagtgtttttgttgccgctaaataagcacttccaactgctgaacctaccatagctgcaataaatggatatttaagttttaaagttactccaaacattgcaggctcagtaattcctaataacgctgaaatacctgaagctgaacaaatactttttaattttttgtctttagttactaataaaattgcaataactgctgccccttgagcaacatttgacattgatgcagttggaaaaatgaatgatccacctgttgtcttgatcgatgccaataattgtgtttcaactgcaataaaactatgatgcattcctgttaaacaaattggtgcatagaaaaatccaaagattgcacctccgaataatcctagcgtattatacatccatgatattccatcagataataagaccccggcttctcttaataatgggccaactaaaataaaagtaataaaaccagtaattaacgttgctaataatggtgttgtaagattgtccagccaagttggtgtcactttgtgtaaacgtttttcaatgttagctaagatccaagatacccctaatacaggtaaaaccgttccttgataccctactgcttcaattgatagtccaaaaatattccatactggtacttctactcctgctttaccatacgaataagcatttagtagatccggatgaaccatgatcattcctaaagctgcacctaaatatggattcccaccaaactttttagtagcactaaatccaattaacactggtaaaaaagtaaatgcagcgtttgaaaataaattaatcattgatgctaaatcagcccattgcggatatgcttcaatcaaacttttattagcaaaaaatagtccttgagctgttaaaatattattaattcccattaacaatccgccagcaacgatggcaggaataattggaacaaaaatatcacttaataactgaactgcacgttgtaataagtttcctttttcttctactttttctacttggagcgtactatcagttttaattcctaaaatatttgttacttcgtcacataccaaattaactagacctggtcctaaaataatttgatattgccctttagctaaaaaagttcccttcacaacatcaatatcagttaatgattcttcatcaaccttgctttcatcaactagatttaaacgtagcctagttgcacaatgcattgcccccgtaatattttctttgccaccaacacaattaattatttctttggcaattttgttataatccatgttttatcctcctctatggtatcggttccacaaatatactataagcgattgttgtgaccctgtcaatactttttaacaaaaaactgaaaccgataccacatttttaataaaaaaagatgttttttattaaaacatcatcacttttatttatttaaatctttgacactttgtcccttaattaaggtatatccaattaactgtaaattatcaacaacattcccttcaattaaatcaatgattgtttgacctgctttaattccagtttcttcattattaaatctaactgtcgaaagactgggattaataaattgagaagtctcataacccccaaaaccaattaaagaaatgtcatcaggcatctttaattttaactcattaattgcttttaaacaccccaaagcgatattatcagttgctccgataaatagagttggctgtttcttttttagataatcaagagcaataagatgagccttttctaatgaaaaatcagtttctaataaatcaatgctgcttactccgttgtcccttaaaccattgatcacaccatctttacgataaattcctacagcctcatccttaccacttacaccgatataacaaatcttacgatgccccatatatgctgcatattttccaacttcatatccagcactataatcatcattaatgatagagactcctgctccataacgctgtgccacaaataatagtggaatatctaattttgcagcaatattttgatgtgccatcgttactgccgttgccattaaaataattccatcaacattcattcgccatagctgttcaatcgaagttaattctcgcatttcatcatgattggtatttattattaaagttgtataaccatgatcttttaaatactgatccatcgtcatcaaaacacgagatgttgtaattgaatcaagacaaggtactacaataccaatcaccttagtatattttgctttcaatgattgcgctaatgtactcggttcataattattttcatcaattactttttttaattttaaacgcgtttcttctttgatataaccaccattaaaataccgtgatactgtactcttgccaacaccagccatttttgcaatatcactcattgttaattttttatctttcataattataacctctaacctaaagaaaatgacgggcagttcccgtcttattaatataatcttacaatattttaagattacggtcaaacaaatattattcaataaataaaacttaattccattatcattgatatactaaaaaaagctgaatcattttgcgattcagctttcactatagctattaattttcttttctttttgctaaaaacattccagcagctgctaaccctgctaccatcgtcattattgccaatgggctgttatctccagtatttactgcatttacaggtttatctggggttggctgtgggtttactggaactgtaattggagctgtttttacctcaacttcaaattcagctgtcatagttacatcttcagaactacttgtagaatgatgtaaagtttccgtataaactacaactacattttgtttaccgactttattagcatcaaatccaataattttagcaagacctgtaacatcacgactatattcagtatcataagttgaagtaactatgatatctaatgcatctccaacagtataagtttttttaccagtaacttcaattcctgttaatttagattttggtaatttttcaccataaggaatagaaactccagcaatttgtgataaactgctagctttttgtgataatgtttcactagttttatcttcccggtaccatcctgcattaccatttaatttaattggcgtcttccctaactcacgtgctcgaattaatgattccgcatagtataagattgttccacgttttaaatgatattggctagtaatcatagaaatactcttaattgttggatgattataaagaatatcaaaactaaattcagcattctgtgctgtattagctgatttattttcaactagaattcgattatctgctacaccatgttcaactaaccagtcgtgcatccggtccccttcagtccaaccgtttttctttacaccaccagttactaaaatatatgaattaggatatttttgagcactagccaaagcagtctctaatcgtcctactaattctggctgcattgttccatcactctttaatgcaaaacctagtacaacaaaagcatgggtattatcatttggtagaccatcaggagctacaccaatattttcgaccatatcgttttcaatccagtcccaataatcaatgattgattgccattgatcataatcatctttagaaacctcttttaaagtatccaaagttctcaaaacgtctgttctagcaccatctcgataataaccgattaaactgccaactagtgtatctactgtttccccttcagcatacactggaatgaacatactaaagcacatcgacagtgctaaagctaagccaagtatcgctttccctaacttcttcataactttttatcctccttatgttatgacttctttattaatatcataccacttttgtctatacaaaaaatattttttgcacaaaaagaaaacattaaatatttaatgtttttgtttgccgaatatgttaaaatataaaagtagccaaaaatactaaaagggaatgataatgaaatataatcattatcattcccttttatttatataagtcaattgtaaagaatattttttgattaaggatagaagttacctctatttcatcactatactaggtgtttcaatacattttttgggcaatcccggtatccaataatcctacatagaagacatcagtgcttttaaattatgaacagcataattaatatagcttttaaatcaccctcataattttataactataataaattccaatctgctcatttattatttatcattttaaatgaaaaattaattttaaaaaatccttggtatatgttacaaatgtaacacaataccaagaattattaaattattgattacttaaatcttctccatttgatttaattactttttgataccaataaaaacttttctttttcattcttgttagtggtcctttaccatcatcatccttatcaacatagatgaaaccataacgcttgcgcatttctccagttccagctgaaactaaatcaatacatccccatggagtaaagcccattaaattaacaccatcatattcaatcgcatctttcattgcagcaatatgtttagctaaataatcaatacgataatcatcattgattgagccgtctgcttcaactttatcaatagctcccaacccattttcaacaataaataaaggtaagttatagcgttcttgtaacctgtttaaagctaatcttaagccagttggatcaatttgccaaccccaatcacttgcctttaaataaggattaagtactgaagtagacatgtttccatccgttacttttttactttcatcagtagtgactacagagcttgaataatatgaaaatccaatatagtcaactgttccttcttttaaaatctcatcatcaccaagttctttaatcaatttaactccatcacgctcaaattcttttaatttataagctggataaaaaccacgacattgaacatcactaaagaaatgtctttgttggtcagataacattaattttaattcatcatcaggattacatgttaaggcatatgttgatccataagctgtcatcatcccaatcttgaaatcaggattaattttgtgccccatgattacaacctttgcacttgcgataaattgatgatacacggcttgagcacggctttgtggatcattttttaagactccacctgcaaacggtggcataaaatccataatattaatttcattaaaagtcatccaatatttaactttatctttataacgcttaaaaatagtttcacaatatttttcaaaaaagcctactaagcgacgatctaaccatccaccatatttatttgctaaatttaatggtgtttcataatgagaaattgttactaccggttcaattccatattttaaacattcatcaaaaactcgatcataaaattctagtcctttttcatttggtgtttcatcatcaccattaggaaagattcttccccagttgattgataatctaaaacagttaaaacccatttcagcaaataatttaatatcttcttgataatgatgataaaaatcaattgcttgatgtgaaggataatattcaccttcatgacattctaataccgcaccatcaggaagtgatttaaatggcattactgcttgactatgtttacttccatcaggcatcgtgtatgtaattctacgagcttcttgatgcgttccattagtcattacatcagcagtacttagtcctttaccatcttcattatatgcaccttcaaattgattggcagctgttgcgccaccccataaaaatcctttaggaaaactcattttttcttattcctccttaatatatttatcattataccgtatcatccttatctctaattagtcctttcatcatctgaaaaatatttcaattcatgaaaatactttgacaagttcatttattttatcattttcttaaatatttcttgatgtaaccactaaaaaatggtatttttttattaaacatttatataaaggggaacagtatgaataaaattgttaaatttgggggttcatctttagctgatgcaactcaatttaaaaaagtagctaatattatcaaaagtgataaatctcgtcgtttcgtggtaccatccgcaccgggaaaaagatttaaagatgatatcaaagtgactgacctattatatcaagcttataatgctaaagataataagacttttgaagaaacatttaaattaattaaagctcgttatcaagatattattgacgaattaaaattaaattgttctttagaaaaagaatttgaaattattaagaaagcttttcaagataaaattggaattgattatgccgctagccgtggggaatacttaaatggaattgtattagctaactatcttggttttgaatttattgatgctagtgaagttatctttattgatgaacatggtaattatgatcaagaaatgactgatccagttttatctaaacgtttaagtaacgttaaaaatgccgttattccaggtttttatggttctgctaatgatggcagcaaaacaatcaaaacattttcccgtggaggaagtgatgtaactggttcaatcgttgcaagaaatggtcatgttgatttatatgaaaactggactgatgtttctggtttcttgattgctgatccgcgaattgttaaagatcctgatactattggtacaattacatacaaagaattacgtgaattatcttatatgggagcaagtgttcttcatgagaattctattttcccaattcgtaatgaaggaattccaattcaaataaaaaatactaatcgtcctgaagatgaaggaacattgatcgttgaaacaacttgtcataaaccagatcatgttattaccggaatcgccggtaaaaagggatttgctacaatcatgattgaaaaagatatgatgaatagtgaaattggttttggtcgtaaagtactacaagtattagaagataatgatttatcatttgaacatactccttcaggaattgatacaatgacaattgtcgttgagactgaatcttttattgataaagagcaggaaattttagccggtattcatcgtgcagttcaaccagattcaattgaattagaatctgatctagcattaattgcaattgttgggcgcggaatgaaagatggtcgtggaactgctgctaaaatcttcacagccctggctcaagaaaatattaacataaaaatgattgatcaaggttcatcagaattaaatattattgttggtgtaaaaaatattcatttcaaaaatgcaattcgtgctatttacaaaatgtttattactgaagaaaaataaaattaatataaaaacatcctcctaatatgtagtgaacccctctgtttgggcaatgatgcgtaccctctttactgggcaaaccagtaaggagggtttttatatgaaatatgattatggatttaagttgaagtgtgttgaactatataaaaatggtcgatggcatgaaacaccagaaggaattggacaaaaaaactttggaaaaagaattactacatgggtcaaaatcgctgacttacatggaatagatgctttaaaacatcctaccacctgcactgagtatactgtggaagaaagatacgctttagttgccagggttctagctggagaatctcaaaaaaagtgttgcaataagtgctaatattaatcacagtcaattgtcaaactgggtaaaacgatataaaatatatggatataatggtctcgatttaaagaagggacgacatagtaaggagcagcctctgaaaaaatctataatatcaagtgaacttactcctcctgagaaagaagaactaatacgtttaagagcagcaatcgttaaagaaattcgtgaaaaaggatatcgattaaagcatcttctaaaggcatgagatgatgaaactgataaaagaaatctttgatcaaaataaggggacgctatggagttcgtcgagttcatagagagcttctaaatcgcggttatctggtaaatcataagagagtgtaacgacttatgcataatatgggattattaggtaaacgtcctaaagagagataccattcttataaagggaatgtagcagataatattattaatagaaattttaatgcgagtagaccattacaaaaatggactactgatgtatctcaattcaattttgcatggggaaaatgttatatttctccaatattagataggtttacaaatgagattatttcctatgatttatcaccgcatcctaatcttaaacaaattacagatatgctgactcaggcatatgaaaagtttcccatccttgaaggattgattttccactcagatcagggatggaaatatcaacatgctcattatatcaattcattaaaagaacacagtataatacaatcaatgtctagaaaaggaaactgttatgataattcggtaacggaaactttctttggccgattaaaaatgaagtctattatgggtatgaaaatgaattgtattcattttcatagttttctactgcaataaaagaatacagaaaaaacaaaatggatgccacctgttttgtacagattagcatccatggcataatttttttaaaactaaatttaaacgtgtccagaaaactgggtacacatcacaaccaactagaagggttcactacatttaatggggctgtctttatattatcaataatctatatctacccttataagttttagaacatcataatagagataaatcaattttaatctaataaatataaatatttatcaatttagcgtatttttaaaccttgctaatactagatggctaatttaaaaaatattaatttttttaatattttatttttcgcttagactattagccttacttttctttctgttacatcctattacgatacttcctgacatcataagtgtgaccgctaagacacctatattattaatatcacctgtttgtggcgccttactagaattagaagaatttgtatcattatttgtcttatctactggtttattttctggtataactattcgttctattacatcaattgtaattgtcttagttgatgaagcaccttgtttatctgttactttataagttacattatatgttccttccttatttgtatttacatcatttgctgcaatatttgcttccgttaacttgattattccatcttcattatcatatgctgtcacatctttcagtggatcaaatgtatctcccactgtcagtactttatcttctgccacaattgttggtactttattaataacagtgggtggtacgttattctgtacaacttctacgtctacaaatttgcttgaataatccgtctttttatcgaaattcaactgttctgtaaaaatcgataatttatattctcctgaactaaatgatttagaattcaatccaatttgatttaaatcaatcgtcattgttcctgcatttactttgtctagattatcttttatattcccataatacataacattattattttcatcttgaactacaacactcaagtattttccgtttcctattgcttcaaaatcaaaagttatcttatcacgttcggtcttaatattttctatatttaatttttgtttatcatcaagtaatgttaatttaaactcatttgtcttactatcgttgactgctttaataccaataatctctttttgattatgacttttaaccagcataactttagaagtgtctatgttcattgctggacgcatactttgtactgtgtacatatttccataatttaatcctccagcacaatttgcaccatatacactgttactatttaacacaaatacaggatgataccgcattccattttccattggctttgtccaatgttcctcatatgaacgtattaaataatttttatcatcagaactaacacgacttttatctccagtatgtaatccaagaggtgcttgatttctattaaatggaacactgctaaaaccataacacttattggtaagctcttgtatacttaaaggaaaccatttactagcagtcatttctgtagtacctaatttttccaaaccaaccgctacattttgtgcatcttcactactttttgaagaaaaaataatgccctcattttcaattgacgaaaacttatttttcatttcatcttccatattagtctttaaatcacttttgtcccattcatagcctttttgccaatatataggagtttcccctggctttacattactataatcaaaaccataatcattttcacgataccaaaaactagttccaatagtcttatcagagaacaaaaacatagtactatttgcattcttactaaaatccttattatctgaatctaggagttgccatttcaatgctgaaccatccgtatcttctccatagtagatataatcaccttgccaattatcctctaaactctctgtataaatcgggtcaaatagtcccccacgttgagactgtatcattgacataacattctgatgaaccagcgtattcttttctaaagcaaatactgtataattatttccaataatatttataagtcctactacaaaagataatccaactattaatattctttttaaatacaacattcagtttctccttattttaaatcaaatctaaaatttttattttctttaaatattcttcaaaatgtttttgcattgtacaataaacttttcgaacagggcaagtttctgtagcaaatctgctacaatatttatcttcctcaagacaactgttaattcttatcgttggctcaaatatatctataatgctaaaaatacttatatcctttgggtgtttttttaatttaaatcctccctgtatccctgtagcaatgctaattatttcattatcacttagtttcttcccgattttaaatactgtactttggggaatcccaagtgtttctgataattctttcgactggacaatatccttttttatagcgatatatagaactattcgtattgcataatcagtagaaaccttcaactgcacctcgttttcctccttcctttctaacttaaccgatgttaggttagtttcaaaatccagaaaagtacagctatctttccgatggaaaataaagtagacattattttccactttatatataataattaatagaaaaatacagttatatttttatgtgtttctagcataattattggaaataatacacggaaataaaagtctaccatgtttgtcaatcgtggataaaaaaatctaccttattttacaaatacttctatttttctattctttttttaattcataccgatttacccaattagaaaatgtcgtatgattggtacttaaccgtcttgcacactctcttttgcttatctgtttttccttataacacaaataaatctcttcaaaattttctggataaggtaactgagggcgtccaaatctgacccctttttcttttgcagccttaattccttctgcttgtctttgttttgtattttctctttctatttgtgcgacatacgacaatacctgcaatactaaatcagcaatgaattttcctgtaataccattaacttgatttctagtatctaaaagtggaaaatctaacacaattatctccacttctttcttctttaccaaatatcgccattgttcaataatttcatcataatcacgtcctaatcgatcaatagatttaatataaagttcatcacctttttttagttttttcaccaatttcttataaccttttcgattaaaatccttaccagattgtttatcgatgaacatttgtctagtacctaatccaatttctttcatcgcaaatttttgtctatcaatattttgatctttggttgatacacggatataagcgtatttattcattcacattcctccttataagaaaataatacttagagaataaaaaaatgtatatatctatttagaaatatacatttaatcaaatataaatgaaattttataattacaaacaagtattctctatttatcaacaatattattcattttctatacctcataatattgattaacatagatacttcagcacaataaaaatacatccaaaaattgcttttgatgcaaatcattgagatgtatttttgttatttctatttagcagttaatccagccattgttatataattataaggttgattaaaatgtggcaagaagaagatatcaagcaatgccaatttatcaattgtcaaatgctcttgaatcgctaatgagaacatatgaattcccatcgaaatatcatattttgatgccatttgacaccctaaaatccgccttgtttcttcatcataaataatttctatcattacttcttgattttcttttataaatgccggtttttgaagatcacgatatgatactgaagtagccttaaaacctaatttttttgcttttgataaagttaaccccgttgataccatctttaaatcatagatacaaattccatttgagccttgaactccaatactttctagtggttgaccacaaacattatgagcagcaacaattcccgaacgaactgcatttgttgccaatgcgatatagttaacatcatcaatcgtattatcataaacagtcgcacaatcgccaattgcatacacatcttttaatgatgtttcttgttttttgtttactaaatatgccccgttagaatatagtttaagtacatcttttcctaactcattattaggtttaaagccaaccgctaaaataaccatatctgcagcatattcacctttatctgttacaactgattcaactttttgattacccttaatttctaaaacagattgattgaatgccaatttaattccatgttctgttaaattttgattcattaaatcagtaaatgaatggtcataatacgctccaaggcaagtatcagcacaatcaattaaagtaacctctttatcacaacgtctaaatgcctcagccagttctacaccaatatagccaccaccaactactacaatgttttttaactcaggattatttaatttttcaattacatcttgagcattttgatataattttaccatttgaacattttctaaatcactaccaggaatcgttggacgcattggtaaagatccacatgctaaaattaatttatcataactttcttgatactctttaccgtccttaccttttgcatagacaatctttttttcatagtcaacatgttccactatcgtttccatgtatataattgcacctttttcttccaataattctttacttgaataaaatagtccttctggtccatcaatttgttttccgatccataatgccattccacaccctaaaaaactaatattgctgtttccatcaaaaacaactacgtcatcttcatagttatctagaatcgtattaatcgcagctgttcctgcatgatttgccccaataacaataattttactcattttttcagtctccttattttttatattattatcatacccatcatttgtatttgtttacaactgatatgcaccaaaaaattaggaaactataactactaaaataaaaaagagagccttgctctcctaagcatctttccacattaacgcaaaacgtacagccttagcccatccttccagacttttttcacgtctagatttgttgatccttggaacaaattcataatttaatttccaattattctttatctcctctttactagcccaaaaacctgttgctaaacctgccaaatatgctgctcctaatgctgtcgtttctacaacctgtggacgatgaactttacaatttgatatatcactttgaaattgcattagaaaatcattttgacttgccccaccatctacttttaaacatctcaactcaatcccagtatcttcttgcattgcttttaaaacatcattagtttgatatgcaatagattctaaagctgctctaataaaatgttctttactgcaacctcttgtcagtccaacaatagttccttgagcataaggatcccaatatggagcacccattcctgtaaaggccggcactaaatagacaccattagtatcttcaactcgattagcataatcgcttgactgaggtgtactttttaacattctaaggccatcacgcaaccattgcattactgctccgccaacaaaaacactgccctctaaagcataactaacttcattgttatcacttgctgcaatcgttgtaatcaatccgtttttagaatgatatatttcattaccagtgttcattagcaaaaaacaccctgttccataagtatttttagcttcgcccggttcataacaacattgtccaaataaagctgcctgctgatctccagcagcacccgaaacaggaatatgtccacccaaaattccttcttttgtatatccataaacgcaacttgatggtttaacttcaggcaacatactcttaggtattttgaaatatgctaataattcatcatcccagcacagctggtggatatcaaacaacatagttcttgaagcatttgtataatcagtgacatgaattttaccacctgttaaattataaatcagccaagtatcaacagtaccaaatagtaatttattttgattggctaattctcgagcgccatcgacattttctaggatccaagcaattttcgaagccgaaaaatatgcgtcaggaattaaaccagtcttagcaataaccatttcttctaaaccatctttttttaactgctcaatcattgctgcagttcttcgacattgccaaacaatcgcattataaataggctccccagtatctttattccaaacaattgtagtttctcgctgattagttattcctattcctgcaatttcgtcagctttagtattattcaatgccattgcttcactggctactgctaattgtgaagaccaaatttccataggattatgttctacccagcctggttgaggaaaaatttgtttaaactcacgttgagccatcgcacttatatttcctttttgatcaaataaaatacaacgtgaactagtcgttccttggtctaaagccattacatatttagccataaagctcatctcctccaatcgattttgttgcaacaatatctatcccactatctaaaatattagcaacaattatttcattcatactaattggggcttgtacttcgatttcctttagtatctgtatacattcaaaaattttatctttggcaattcccccattactcttaacacttaacatataaggactatttttcactctaattgtcgttgttagaattctagtaggattagaaatttctgctagtgcatattttttaccacggatacaacgattacctgtaaccacatattcctcatcaatataccgaacttctaaagcacaccctaacggacaatttatacaagtcagtttaatcacttccatatcattcatcctccaatgtaattaagatttttttaatatgttcgtttaaccagtctttttttattacaatttgttccatttcaccaggtgcaagtactaatttacgttgatgaatcttcctatcaccatctagatacaatgatagatatttattttgataaaccttatcaactctaaaacgaacaataacattatcgtcattattaggatgaattactgaaggaactacatagcgaataccacattcatatgaaatcgtaatagtttgacacaaaacaagatggtctcgcaaatatttagccgcatttattcccgccagctttgcctcattagatacataatcaactaaatcatgaacatgcagaacattaccacaggcaaatatccccggttgatttgtctgcaaataatcatcaacaatcgctcccttagttaaacttgaaagcataacattagctttagtactaatttcattagcaggaatcaaccctaccgagagtaataatgtatcacaacaaacgcgttcctgactgccttctattacgttaagattttcatccacctttgcaacaataacagcctcaagtcgttcctttccttcaatatcaataattgtatgtgacaactttaaaggaatattataatcatctaaacattgaacaatattacgtttcaacccactagaatacggcattagttcgataaccatctttacatttgcaccttcaagtgtcattcttcgtgccattattaagccaatatctcctgaaccaagaattactacttctttccccggcatatagccatcaatattaacaaaatattgcgctgtcccagcactataaataccacttggacggtaaccaggaatatttaatgccccacgactccgttcacgacatcccatagctaaaattattgccttagcatgaatcataaatgtcccacttgttccattcatcgcagttataaccttgtcattcaagtcaattactactgtatttaatagatagggtatttttaattcatctatttgacgtcgataacgttcagcatattccggaccagttaattcctcattaaatgtatgtaaaccaaaaccattatgaatacattgatttaagattccccctaaacactcatcacgctcaataataattaagtcttttacacctgcttcatatgcccctaaagcagcggccattcccgccggtccaccaccaataatcactaaatctttattcatgattgacctccttatttaatcccaccaaataggttgaatgtttaccatttttagtaatagtaaaaatatccttatttaattcctgacttaataatttcattgatttatttaaacaaaaaccggattgacattttcccatcccgacacgaattcgtctttttaatccatcgatcgtagttggggatagtggacgatttattgcttcaattatttctccagcactaacattttcacaaaaacatactatttggccatacaatggattctttgcaatcaattggttacgtttttcaagtggcaattccatcaccttagtaattcctttgcgatatttaataaaattttctttagcttttgcaggatacttttcgccaactaaatcataaacatatttgccaatcgctggagcacttgttaatcccggtgattcaattcccgccacatcaaaatatcctggattatctagatcctctttaattataaaatctcctgttgtattatgagcccttaatccagcaaaagaagttatttgatttgcataaggaacctgcttaatgcttaaagatgcgcgatcaacaatatccttttgtccttccatcgttgtattgatctcttcacgattacaatcaattgcatcaggaccaatcattaaattaccatgtacagttggagtaaccaataccccttttcctaacttagtcggtaattgaaaaatcgttttgcttaccattgagccaacggttttatcaaataaaacatattgccctttacgtggaactattttcattttctcattgcaaattaggttatgaatcaaatcacaattaactcccgcagcattaataacgatcttactttgataacacttatccatagttttaacaatataatgatcaatatttttttcaattcccacaacttcttgagtaaatttaaatttcacaccattagcataagcattttcggctaatgccaaaacaagatcaaaagggcaaataatgccaccagttggagcataaagaccttttaaaacattaggatttaaatttggttccatctcaagtaattctttagtatctaaaactttcaatccttttaccctgtttattaagccttgctggtataattcttccaaagcttcaaattgactttcatcaaaacataatactaatgaaccattttggacaaagggaatatctaaatctttagctaactgcggcatcattaaattcccttctaaatttaattttgctttcaaggttccgggtttagcatcgtgaccagcatgaacaattccagaattggctttagatgtacctacacaaacatcactacctttttcaagaacaagaattttgcgttgatctcgagacaattcacgagcaatcgcacagcccgttactcccgctccaataataattatgtcttccataaagtgctcctttctaaacaaaaatagggacgattaaaaatccccctgcgtaacttttcctatttataattttatcacaaacaactcgtttaaacaccatatataattattattacttgtttttttaaacataaataaaaaagcagaagttttcctcctacttaaaaattattcagtttgcttcccattaaaaacaatcagaccagtaattgcacttaaaataatgaaacatccaattaatttaacgattgttaactgttcatggagaataataatcccaaaaataacacttgttaccggttcaaacatacttaagattgacgctgtagctgcacctaaatatctaaccccctgttgtaaacagataattccaacgattgatgttaaaactgcaatcaagaaagaatagccatatgcttcaactggtaaaatcagttcaagctgaccactgatcagtccaatcattaataatgagattgaaataacgattgcaaaatagaaatttaatacataaggattcaaagactgtaatcctaacttttcaatacctaccatataataagcaaatgttatacctgaaaacagagccaaaaatagtcctaaaaaagatgaaccacccaattcgataaaaaataaaattccaaaactagctgttcctaaacatattttaacagctttagataatctctctttataataaaagaaacatattaatgaaacaaacatcgggtaaagaaaatgaagtaccgtagcactcccaacttgaataaaactgtatgaagtatatagtgccgctacagtcaaagcattaccaataattcctactaaacaaatattctttaactgatgtaaagttattttataaggcaatctttggcatttcataattaaaaataagattggtattacaaataaatgtcgaaaaaaggccattgtaattccattgctccccattgaataagttattttagcaagaatcggggtaaaaccaaaaataactgctgataaaattgttaaaaaatatcctttagttttcatttttcctccataaaaataatagatgtgctatgcacatctattatcccaaatcttcaccattagtttcaataacttttttataccaattaaatgattttttctctcttcttgaaaaatcacctgttccatcatcatatctttcaacataaatgaaaccataacgcttagcatattctcctgttgatgcagataccaaatcaatacatccccatggtgtataaccaattaaatccacaccatctagaattgcttcatgcatttgttcaatgtgacttctcaaataatcaatccggtaatcatcattaattgaaccatctgcttcgatttcatcatatgctcctagaccattttcaactaccattactggaatttgataacgatcatagatttcatttagtgaataacgtaatcctttaggatcaatttgccatccccaatcagatgcttttaaatatggatttgctacaccgcctaaaatattaccttcaccagcccctttagttggatcggctgtttgacatactgacatatagtatgagaatgtatagaaatcaactggtccagcttttaatatttcttcatccccaggctccatcgttacttcaatattattttctttaaaataacgcttcatgtatgttggataatatccacggcattgaacatcactacagaaatagttcatgatatgattttgttgttgatttttaatgatatcatcaggatcacaagttaatggatatgatgttgcataaatcatcatattaccaactttataatcaggatcaatttcatgggctaattgaactgctttagcactagcaataaattgatgatgcaatccttgaaaacgtaattggggatcatcaacctgatttgtaaaatcagtacttttttcttgttcatttaaaattccttgtgataaaaaagctcccattggcatcgttgcgctattaatttcattaaaagttaaccaatattttactttacctttatagcgttcaaaaatagttttacaataattcatgtaatagtcaatcatttctcgtgatgcccaagcattgcatttctttgttaaaccaaacggtacttcataatgtgagattgtgatcaatggttcaatattatattttaagcattcatcaattaaatcttcataaaattttaatccttcttcatttggtgttgtttcgtcaccattaggaaaaattcttgtccaagcaattgaaaaacgatatactttaaatcccattttagcaaataaagcaatatcttctttaaaacgatgataatgatcaattgccatatgtgatggatagaaagtcccttcttctaatgttggtgtaattcttttactttgagtatggcttccaccagtacaaatatcagggcatgaaattccttttccaccttcgttccaaccaccttctaattggttagcagcagttgcaccaccccataaaaatccttttggaaaactcatataatacctccttgtttatgtcatgtacattttaactgattattcagatattacaaaatttttttcaactcttgaaaaaattgttattactctttttattagttaatgcccaggcactaataaacgaagcaattggaacagttgatacgattcctaaagtaccagcaattccttgagcaaattctattgcaatataattagaacttaatagttgtttaatgtcgacattgtatgaaaataagactaataatgaaacaaatgcactaccagtaaatgctaaaatcaaggtatttgtcatcgtaccaatcatatctttaccaatttctattcctgaatcaaaaatttgtttttgagtcaagtttggctgatgatgaaataattctgataaggcagaaacaattgacattccaacatccataattgcccctaatgatgaaattaaaatccctgcaaataaaatatctttaatcgataatcccgtagcttgattaattaacacaaggctttctgcctcatcaacactaaaaccattaacttttagtactaatgacattaaataaaatccccctgccgataaaactacccctaaaactgttgccacaattgcactataagtctttttagaagcaccatttaacaacattaatgtaacaatcgttgataaagcaacacagataatactcattaatactggtgagtaacctgaaaatacagttggcagtaatagaaaaattactaaatataatgtataagctaatcctaagattgctttaatcccttttccgcgcccaattgcaatgataacaagcaataatacacaagtaaaaataatcattcctaagccacgatcaaaattataaaccgtataatacgagtctattccatctggttcatcagctgagataatcactttcgagccaatcgcaacttcaacattatgagcagctgttagataattatcgatctctactctttttcctgcactttttccttcaagaatctcaaccacaactacttgttttccaagatttatttttaaatcttgatcatattcaagattactgctcgttatttctactatcttcccgctaacaaaatcagttgaatcgttattaacccgagaataatccttagctaaatattgattaaaaaaaccagctgcaattatcgtaatgagcataatgataataacaacacgattctcttttaattcattaaatatcttcataaatgacctctaataaaagttagtggtaatcaatgattaccactagttattttaacttttcttctttttttgatttataagcaactaatgaacatcccaaagctgtaaacaataatgttccccaagcaataagattactattatcaccagttacaaccttattatttgtcgttgtagtagaattatttgtatttgatggcttaactgtcggaagattagtatttgaaccattacctgtatctggctttttattttctacattgttaactaaaacaaattgtcctaatgaagctgtttcaataataatccgtccatctttaattgtatatgtaatcgggtttagtgttatatcattgttttgactatcttgtacttgatagatcaataacttactagcatcatatccctctggtagtgctaatgataattgaacctttcctaatggatttataatatttccatttttgatcagtgatagatcaaatactttaaaatccttatcactacctaaaatagtatttaaggtatttttaattccttgatataagtcaccctcattcacttcaactgctgataaagtactgtttttttcaactgttcctactggagcaactactctaatatcatttgctgtttcttctggtactaatgtaatttcttgattgtttgtttcaactgatttattaatagtgaattcatctaaagttgaccattgattatcattactgttgtataaataagttgttactttaaaactattttcactaacttcaatatttgaaattgaacgttgttttgattgatccattttagcaacaaagtcagtactaatattagtcttgatatcataatacttgctgccacttgctgaattggcagttaaatataagattccttcaggatctgttacactagttaaatcctttgtttcttgactaactttcattcctttcatcatattactacgtacataaacatggtcatgtcccattaaaacaacatcaatacctaaatcatcaaatacaggtgttaattcttcacgacgttttaaaatagaactctctactgaatgagaagcaactgaataaactgagtgatggaaaacaactactttccaacgaacatcttgattttccttaattgcttctttcataaatgctttgtgttctgcggtacttgtattatttgtattgatattcataaataaagtattattataaacataccaataatcagttcctgctgcagtttcccctttagcagtttcatttggcaaattgaaatgttgtgtataagcatttgaactactatcatgatttccgattgttgttgcctgaggtacacttgttaattcttcatgatctaagtagccactgtattgattctcgtcacttgcagtattaacttggtcaccagctgaaagaatgaagtttggattaaacttattaattgaatcacttaatgttttatcccatccttctgtatcttttgaagcactaccacttgctccaatttgtggatcacctgcaaagatgaagttataacttccatcaaaatctttagttgtgaaatcataaattttgctcacttgatcaccattaacaacgcgatatacatatttagtattttcttctaagttagccaatgttgcttggttatagtaaaatcccttatcgtttgcctgattattcgtagcttcaaccgttgtaaattgacttgggaattcaccattgatcatagctcctgctttagccagctgaacagttcccgaagtattagtattagcgtaccaggtaagattcatttttgtttcatcttcaccgatagttaaattaagcgccttttgttcaactgttgtttcttcttggccgtaatcaacttgaagattattaaactcaaaatagatatctgaactgctcgcacgaccctgatgtaattctacagcaatcgtattttgaccagtcttaataacatcttttaactgttcttttgttagtgaaataactccttctttaggattactagcatttgaaccgccataagacatgtttgattcaaagccaccctctggttcatcaaacgatgctaccttaacaccgttgatataaacaattgctgcatcatcataatagagtttcccacttagactactgaaatcatctaaattactaatattaactgtagttctaaagaagaatgctggaatatcatctccattaaccccattaatatattgatttaataaaactgttggtacaaaaccatcgcctaaatcttctaattttcctttttttgcaccaaattttccagcttcacttttccactctgaatcgttataatctgcttttgtccaggcataacggtcagtttcagttcccggatcaacattattgtctaaatatttccatgttgttgccgtactaatcaattgcgctgaatctccaatttttgttgtttcagcataagttggtgtaacttgataatcttgcgctacatatccagccgacatcaacaatgctaatgtcgccattgaaacttttaaaactttgttttttttcattgtctattcccctttatttttaacaccaacatcttatcattcataaaatataacaacaatacggtttacaaagacttaattaaattaacacaatatctattttagatacaaaaactaaaaaaacgttacccaaaaagtaacatttccttaaaatatcctctattttttttacatctgctttacctaaatgaacataatataattagtgatatatcattataatatataattattatccttattttttaataccgcacaaattcatttcatttacaaaaaactgcatacccgattttcctcaaaaattttcataatctcatttttcacctcgactaatgatggtaatacagcagatgtacgagctaatacttctttacaattaggaagataatctggaacacaaaccactggaatattagcggcatttgctgccaatattccatttgttgaatcttctaaaacaagagcatgatcagccgctattttaaaatattttaaaacttttaaaaaaatttccggatctggtttaccatgttcaagatcatcaccgccaacaatcaaatcaaaaatattctttaaaccagctaaagctaaatattcattaatcttactataggcagaagaagatgcaactgctatttttattcctttattctttaaatatgtgattaattcaaataagccaggtttaattacgatcccatgcttatataaataatcgcttctaagtttttttgataattcatgaatctcttttgctggacaatcttgaccaaattttgatttcatcaaagcataatgatcattggcattgattccaatcagcttatagcgaaattcttcttcaattatgtatccaaattgtttagccgctcttgcaaaacagactgctcccaatggttctgtatcaaacattaaaccatccatatcaaaaatcaccaattccaatatcattgttttatttagtgattatcttttcaatttctaatttaacttcattcaatgaaggtaatgtggcatatgttaatttaataatatcttgaccatgtttaactaaatcaggtacacagatcacgggaatatttgcattatgagcggccatgattccattacgagaatcttctaaaatcaaagcttcattttttttcaactcaaagtgttcaagcacttttaaaaagatctccggatccggcttactatgttcaaccatatttccagcaataatgtaatcaaagacattatcaaatccagcaagatgattatactcatcgattgtctctttacttgacgatgatgctaaagcaagcttaatttcttttttttgtaaataatttattaattcacataaaccaggtttgattatcattccattttttcttaaataagccattcgtgttttacgtgattctttactaattagatcataaggataatcagcaccaaatttttctttaactaatttttggtaatcattagcattcatgccaattgaacttaatccaaattcttgatcaataacataaccaaatttttgagctgcattgattaaacaatccattccaatttgttcagtatcatacattaaaccatccatatcaaaaatcactaattttaaattcatcattcttcccccaatataataaaagagcgttttttcgctcctttatcttactatattttctttaataatacaattaacttaaatcatcaccattagaggcaataacttttttgaaccattcaaatgatttctttttagaacgttttaaagttccatgaccttgattatctttatcaacatagataaaaccataacgtttcttcatttcgccagtacctgctgaaacaatatcaataggaccccagtaagtatatccaatcaaatcaacaccatctttaattgcttcctttaaagcttcgagatgatctcgaatataggcaattcgataatcatcattgattgagccatccacttcaatctgatcaatatttcccattccattttctacaataaacaaaggtacttgatagcgatcataaagctcattgcatacataacgtaatcctaaaggatcaatttgccagccccatggtgtttcttttaaatatggattagcttttccaatgacaccgccagtattacctaaaattggcattccatcttcatatgttgttgttcgataataactaaatcctaaatattgtgaagggtaatctttaattaattcaaaatcttcaggacgtgtgtccaactgaatattattttcctcaaaaattcgtttaatataacttggatatttacctctaatcatcacatcactgaaaaataatgaacgacgacgtaaattataagcacccattacatcttcaggtttacaagtagctggataaacaccacttaatgacaacatacaaccaatctttgcatctggaataatttcatgacacagcttatttgctcgactacttgcaacaaacatattatgagccgcttgaaatttatcttgtagattactatcatgacggattgctccagcagcaaaaggaatcgtatgaacattatttatttcattaaaagtcatccaatattttactaaatctttataacgattaaaaagtgttcgacaatatttttcaaaaaaacaaatcagttctctagatttccagccaccatattgttctactaaatgtattggtgtttcataatgtgaaatcgttataactggttccattcccagctccagcatataattaaacatttcctcatagtaatttaaccctgcttcatttggctcttcatcatcaccattaggaaaaatacgcccccatgaaatacttgttctaaaacaattaaatcccatctcactcatcaattgcaaatcttctttataccgatgataaaaatcaatggcctcatgactaggataatatttaccaggaataacacgatagtcaggtacattgattaatcctgtactaacgtcagtaacattaagccctttcccatcttcatcataagccccttcagcttgattggcagcaattgcaccaccccataaaaaattctttggaaagttcattgtataaattcctccttgatattactatcttagcattatcaattttaaaaattattctttttcatatttataaaaggcttttcaaaatatgaaaaaagtgtcacggtttatatgggagaggggccgtgacactatacatgatattatatcagtcttaaaaaaagttgtctagactatttcaataaaaaggagttaggactgggatgtcctaactttgtggggagggaagaataaattcttccttcattttgtgcttatgcacatttgggataaagtggttcattactgaaccgcccttataatagcatataaatttcaaaaaggaaatttattttaacacaaatttaacaaatattgataatatggtaatatttttaacttgaacaccttaaaaatgtatttaaattatcgccaattactaccatcacatcgcttcaaaaattcattaattaaatagtctaaatgctcttgattttctgttctaaccatgtaaacatgattacccatcgctgcacttaaaacttcagggacatcaacatcaagcataatatttccaccgaactgactaattaactggtcatgatcaaacatataaccaatatcattacgacgaccaatatatgcaactagatatttctgctttagttctataaaacatttatcataaattaccatatcagcccaaattgtataaacgtcactttcataactgaaatttatcatatctggcatataagcccccggagctcgcatattgacttctaaaccaactaaatcaccttttttccctaaaccttctttatctgaatcaagtctgaaaaattcgaaatggaaaaaacgacttcttgtatcaaaagctttaactactttcgttccaatttcttctatatcactaccagcaacaaaacgattacaaaaagcagtgtcacaatgctcatttacattatccataattgaatttaacataatcgtgctattggcgattaaaacatttttattactgtcggtaattccgtcaaaagtttcaacatgtccgttgacatattcttccataatataaatacgctcatctttagtagcaaaaaaatattctaattctgcttgattattcagtttataagtagatgtagctccaaccccattatccggctttaccacaactggatacccgaccgcatcaataaaattcaaagcattttcaaaattatcaattagacaatatcgtgccacattcaaaccaacactttcatagacggctttcatctttgatttgtatttcatcactgccaaatcttcaaatttagtaccactgcatatattaaaatcactgcgaattcgtgcatcagtctccaaccaatattcattttgactttcaacaaaatcaattcgaccatacttactaatataataagctaccgctttatatacttcatcataattttccaaactattaacacgataatactcacttaaactttcttttgtttcattgctaatctcactatattgagcatctccaattcctaaaacatttactccacggttttttaatcgagaacaaaagttatgaaaatataaaggaaaatgcggtgaaataaatactacattcatatgtaattccccctataaaatatgatttataaaatacggcaattgaatttgccaccagtcccaatcatgattaacatcatatccccaataatcaatccaagctggaatatccttattctccaataattcttgcatacgatgagttgaatagatcatttcatcttcccaggcaccttgaccacagcatagaataatatcacaatggcggtacatttctacatatggatgatcatatgacattccttctaaatattgaataggactattattataaagtctctcatcatgataattaccaaaaaataaatcactatcataatatccactcaaacaaatgcatccttgaaatatatcaggtcgcctaaacataaaattagctgcatgagtcgctcccattgaacatcctgtagtatatattttttgaccagtaccattaatatcaaaaattcttggaattagttcattcataacataatagtaccactgctccatcatataagtacgatgcggtccatttccgccttcatcagaccaacattccccatcaatactatctaaacaaaatacttgtattgatcccgcttcgatcttgtctgcaatcacacttaccataccaaaattctcaaaatcataaaaccgaccatcttgagcaggaaaaactaatagcggaatgccggtatgcccatagattttaaattccatttctctatttaaacaattactatattctttaaaatattcaactttcattaacagacctcctttaataccttatcaataaaatcatttacttcatccattgtttcaaagcgagcagtatatgtataatttcccatcgctcctgataaaatatccggcattctttcgttcattacaatatgattaccatacattgccatcaaagcatcatcgttataataatatttcttgccatcacggcgtccacaatagatacaatgataggaacgattagtataatattcactatgattgtatgtgaccatatctgcatagatattataaacatcaatatcattagcccagttcatcatatctggcgtataaccaccaggtggtcgcatattaacttctaaaccaataaaatcacctttatttcctaagccaggtcgatcttctaataattgaaagaactcacagtgaaagaatctagcgttcactggaaactcctttactacactacgccctaatttttgtaattcctcaggaatttttcgcaaagaataatagtgaatattactatgattattaactacatccataattgaattaggaaaaacatgtgatgtttcaaataatacctgatgctcattattagcaattccatcatatgaaagaatcaaaccattaacaaattcttccataatatattgggtaatatgatcaatattatagaactcctccaactcttgatcattattaattttatatgtcgcagctgctccgacgccattgtcaggtttaacaacaacaggataacccacttcacttataaacttcctaccattttctaaagtattgacaagatgatagcgagctgtttttaccccagctttttgataataagctttcattcctgacttagttttaaaaatcttggtaatatcttctttcatccccgtattgacattaaaatctgttcttaatttggcgtcgagttctaaccaatattcattatttgactcaagccagtcaatttttccatatttacttgctaaatatgctacacaacgatatacattatcgtaattttccatgttattaacataacagtattcagtaactgaatttttaagttcttcactaatactttcgtttggcatgtccccaattgccaaaacattaacaccatggtttttcattcgatcacaaaagttccaataattcttgggaaacattggtgatataaataaaaaattcatcaaacccctcctttattgtatacaatgacttttcattgcttaacataattataacatacaagttaaaaacatgtttaaaatatattaaatcaatctttataaacaaaaaaatcatcaattattataatcgatgattaatttatttaactggttttaaagaattcgcattagcttcaataactgcataagtatgtcttataccactcgtgtcgttctcactttttaaaacagctttggctgttccggtatattttgaataatttccctctttaatacctccagtaaaaatataacgagttatttgaaattcttctttagtttcagccatttcatttgtaatccgtttgcttgaaaccgttaaagtaaatgttgcgtcagatccatcaccatttttaccatgatcattcacataaattctaaatgaacataaactaatatcaattcccatttcttttagtttggcttcatatttaataccaaaattcggtccattagaatccattacaacttttccactcttgctgaaatattcttcccacatatcaccaaacaatattaaaaaaccccgtcggacacgatcagcgatattatccatataatagacttcgtctttagatatatacaatttaccattttcatatataacataacatgaaccatcctctaccttataacaaaagaaaccgacatcatcacgtgtatcattaggatagatactgaccagctcccctttcaaggccgttctttttaaaattttaccatcgctatcttttaaggcaatatcatctaattttgtcgctccattgacttcactacataattttttggcttcaacttgtgctgcagtcaatactttatcaccctcagctaaatatatttcctcgttactatcacgataataatttgttaaagcaggccaggctagagccgctaatatcgcaaaaatcatcaaaacaacaactatttcaattaatgaaaaacctctcttgcctttcattctctagccccctttataatttattgtaaatactgtttaaactctgaaatatcactagcacactttttagctgtatctaaagttatttttccttcacgcactagatttgcaagagcatgatttaaagatatcatcccttcttttttacccgtttgaataacagaattgatctggtggcctttattatcacgaattaaatttctaactgcatcattagcacgcattatttctaccgcagcaactcgtcctattccgcttgcatgaggtaataaagtttgtgtaattaccgcatttaaaacacctgataattgagttctaacttgagcctgtttatgctgaggaaaaatatcaattattcgatcaattgtcttagctgccccaatcgtgtgcaacgttgagaaaactaaatgaccagtttcggctaatgtaataacggcactgattgtttcgtaatcacgcatttcaccaactaaaataacatccgggtcttcacgcatagcagagcgtaatgccatatcaaaatcttttacatcttcaccaatttcacgttgatgaattaatgcttgtttctgtttataaacatattcaattggatcttcaattgttaaaatatgacaatttctctgtttattcactaaatcaatcattgctgctagagtagttgatttaccacttcctgtcggtcctgttactaaaactaagcctcttggttccattgcaatctgatttaacacggtgggcatttctaattgctctaatgttaaaatttcatcattaataaccctaattgcagcacaaatattagtttgttcataataaatattgacccgataacgttcctccccaacatgatagacaaaatctgcatcttcatgacgatcaacattatcaatcaatcgttttggaattaactccataatcattttgattaattcattttgaggaaactcaattggataatctgccaataaaccatcctgacgaacctttattcctgtattagcactaatatgaatatctgaacatttattatttcgagaagcttttaaaatttcatttatcattattttcacctaatcactatataccttaattttatttaattctgcgactgtcgtaattccatctttaactaattgtaccgcttgatcttgcaatgtttctaatccttgttctaaatttaaatactctttgatctcgtcgatttcagcctttctagaaatcatccttcttactgtcccatcaattaaaataatctcatgaacagcaattcgtcccttataacccgtattattgcaatatggacaacctttaccaattgaaacttttttaatatcttcaccaacagcaatcttatcactagccttcgctggtacttcttctttgcatttcggacaaattgtacgtactaatcgttgtgctacaacccctactagtgaattagcgactaagtacggctcaactcccatatcttccaaacgaacgattgcactgactgcatcattcgtatgcaatgttgacaatactaaatgtcctgtgatagcagctctaactgaaatttcagcagtttctgcatctcgggtttctccaaccataataatatctggatcttgacgcattaatgatcttaacccgacttcaaaagttaatcccgccatattattaacctgtgtttgattaattcgcggtaagtttttttcaactggatcttcaatcgttgaaatattgatttgccttttagaaattgattctaacaacatatagagagtagttgttttcccactcccagttggtcctgttacatatatgattccatgtggcatattgatcatactttcaatcttattataattatcaagcgtcattccgtaagtatcacttcgtgtaattggagtatttgaatttaagtaccgcataacgattttttcgccaaatacggtaggaattacagatacacgcatatttaattccaatccctctactcttcctacaaaatgaccatcttggggtaatcttttttcagcaatatcaagattagatagaattttgattcttacaataagtgaattttgaatatttttttgtagtgtcaaataatccaccaacatcccatcgacccgcattcttataattactttatcttcaaacggttcaatgtgaatatcactagcattattgacatatcctcgagataataacgtattaactagttttacaacaggtgtatcatcttcagattcattgaagagatcaagtgtatcttcaacaacaatagtatttaacttaatatcatctgcaatatctaatgctgcaacatcattataataacgatctatcgctttagatacctctgctttagttgctaaacaaacatttaaatgcattccagtaacaagacgtacatcttcaattccatagaagttcaatggatcacttgttacaatagttaattgttgatcagttaaatcaatcgcaataatattatatttatcagccattgcacgcggtatcttttgtactgcatctatatcaacctttatttcgcttaattcaattaacggttctgccaacttatcggacaaagcttctaacatttgatattcacttacaaatcccagatcaattaaatgttgacctaagcgtttacttcgattagacttttgcgcttctaatgccacatttaattgctcatcatttatatatccatattcctttaatacttcaccaattggtatattcctcatatatttcgtccttcctatcaatacatagaattctttttattaaaataactatatggattatcaatatcaattctatttccattaatatttgtaccattgactaggtctattgtcagatcaatagttttattaaatgtaataaatattgatctaccaccatttgtaacataaactacatcatctttaatatacgcactttccaaataccaatctcttgaaattatttgccagccagatgatgctgaaaggcctggagcactgccatcaccatcaaatacttttaaataatattgttttcttccatcaacatcctcatatacccaactgcctacaggatacacaactgtatttaaatatgctggtattttgttaatttgttctttagtcaaactatctaatttgttcattaccgtttttattctattttttgtgcttaactctaagcagtcatgtccactatctgtagtaggattcgttgttcctaaatcttcccaataattttcatgaatcccattccatccagtaggtccatatccagaatcgccacctttattgtctaattgttttaaacacttatagtaatgtccattttccggataataaattacatcattaactgtatatgcactaaatctatcgtaatttttatcaatttttttccatttttgttctctatccggttctgcaccgaaaccataattattttcttgagtgattaattgccaccaataacctttataataaacaaaatcaccaatcatataatgtctttgaactccatcaaatacacctctattattataagtatttatacaatgtacttgatcagctactgtaatattatcattactttcatcaggttcttctacatcaggcttatcattagtatctattatatttatccccttgatataataaatcctatacgtatcatttacttcgacctgatttgatgcactaactaaataatcttctcctccagcctcaacttttaatttcaaattatcaaaagaataacttttagcagtaccatagactagctcactttttttattaaaatcatactttacatctagacgatacccgtcataccccttaaccttaattgacacggtataattatcatagtatttatcatcaaacacctttattccatcacgatataatttaccatcaattattgataaatagtgccatccttctctttcatacggtgcctcgttatcgattgctaaatctgtaacataattaatttcattatcaacatactcagcaattccatctaatttttgtttattttgatcgcttaatttttgatctcgaaaaaaattaagtgatgtaacaagaatcgagccaacgatcgtcaagaggaccgtagagatcaataaaacaactgtgacttcaattaatgtcataccattattattcttaaattgtttcatcttaatctccccttccctctttatttctaaactatgattactttatttttacccactgactttgatcagataaatttattttttcgctaatactaccatcaaataaactatctacagttgccttagcattactgaaccctgccacatccacatagctgttttgatcacttgtaccaaatgcaaatactttataataccagctgccacgagcataaatcaaattagttcgccattgtgttccaccactaattcctggtaactctgatgccattaaaaaatagccatcctcgctatcaattccaacttgccagataccgccacaaaaatatggtttaatatatagtgttttatcaccgatacgagcctttttctcattttgattagttgcggtttgatgaacctcatcaaaaatccgattacattcattaataatatcctgttctaatgttaagtgcgcagccccatatctattatagtaataatagcgataacagtcgttgtttttataccagccattatacgatgccacatcaattccttgctctgctatccattcatcaaattgtttaatagttgtaaacgaaagtacactatctaaaaaatcattacaattagctactgtttgtggcgtatttgaaagatttatgttattaaaattcaattttgataacatagtttgactatcttttttacttgtagcattactctgatttgtcttaacagtaataactttatcagcaactttaataataaccttagcgtcttcattagaaacattaatatctttatcagtattctcatttcctaataaggcagcatactgtttattagttatatctttataccgagtactatcagcaaaaacatttgcagcagtagaaaaaccaaccagcattattaatgaggcaattgaaattattgccaaagctactatttcttctactaacgtcattcctttattatttatcatgcggcttcacctccgtcataattaataactttccatataccgcctattttttgcattactgcttgaacattactggtacgaccattatattcataagtaatctcaatatatattaacgggattatctttttatcattatccttttcttgctctttatctacaatatggataaccgcttgggatacttctcctttagcatttggtaagctgatttcaggataaatgttatcttcaaaagcactacttttaggaattaaatccgtttcgttatcaccaattgcttttataagtgaatctaaagcactctttgcatatagatcacattgtaattgatttcgattatcgatcgaacgattataacttgaataagcaaatgttaaagaggcccctataatcaataataatatcattacgatcatgaccgcccatgtaagccctgagcctttattattcttaatcatatttagcctccttcatatcatttttcaatcatatataaattatatgttaaaattgtatattctttagtactatccctattataagtgtactgtaattgagttaatgcaactcctgtattttcagatatcttacctatataacgagcaatgtttgtagggcttcctgtaaccttttgctgcacatttgcaactaacgttttagggttttcttctttttcttcgctcttatttgaagttgtttcgcttttactgttactttcagcctttgcttcttgtaaggccacgctaaaagatttaatttctgtttcactagcctcattgattgttaaatcaactggtgttaggttatactcagctgccaattctgaaaaataaacatctatttcataatcattcataatcgacataaatttattatgataatcgactaactcatctttcgcttttttaattgcagcattaacatctatattagtttcatataccgcctttttactttccaactcaaattcaagattatcccgctgttgttttaatgttgtattttttgccatagcaggagaaatcataaaataccagcccacaacaactaccattagtaatactaagatataaatcaagatttgttcacgtctacttaatttattcattgatccctcctcctaaactacagataactgtcatttgataaacaactaccttttctggggttgtactaggcatatagatagaaccagaattactagattcatcttctttttccacttctttataaccactatatcttacttttgtaaaaatatttagatccatcaggtttttaacaatttgttttgtgtatggaacttgacttgtttcaataaccaaggttagttccccggttgtttgttcataattacttgaagtaattttgccttgtaaagccgctttataacaagcattataaatatcttcacttaagttaggataagaagcaatattagcattaactttttttagattatcaattgttttttgaatttcttgcaatgaagcatatttttcttcataatcactatctttataacttttttctaaatcacttattttctgtttaatttcagcaatatcatttttataattaccttgtttaacttttaaatagccaaaagcaccacctataatgaatactaaaaccaaaggcaagataagatatttaaggtattcttggaaaatattttttttcttggtagctagataatattgttccagtagatcaatatctttgcttttatttcgcttgaacattattatccctacctttcacataaacttccaatagcataaacatacttatggagtaagaattccttagagttaccactgtaataaatcgtattactattagctaagcgcattgcccttatatcgacactatcacttactacttcaaatagcattttttcttcataatcatccaatccacaaaaatatactctttcaatattttgattataatcagccgttttaataaactgcttaaacttaattaaaatattgcttacttccatagtaaaggaactgcttcctcgctcagaaaacaatcttgaacggttcgagaaaacatacttaccttcctcaaataaatataaagctatatcattaccattaatcaccgcaataacaaagtttctttgagaaagtctgataatatcttctattaacttatcgattgcattaagagaaatatcaattgcagttatttcaatccccacatcatcaaaaatatttaaataatcttctatcatctgctttttcattgcacaacaaagaatctcaatccctggtttatctactaatttatcttttaaaattgtataatcatagatcaaatcatgttcaccattttctaagctatcaatttcttctttaacgattgcatgtatttctttatccttgatcttaggaacaattaaattcttatgcacgatttgtccactatcaataaccagcttacaatcaccaattccttttttattaattatgcgcaatacatcttttaaagcatcttcatccatgattgcaccatcaagcatagtcccctcaggtaattgataatcttgaaaatcactaatatcaatttgattactgccattacatacaccactgaccaattgtgcactcgtattcgataaatatattatatttttcataaagtccccctacatacttccaacattttgatacattgaataaattggtactaacacagaaataataattacacaaattactactgctaaaacaataatcatagctggttccaaaatagcaaccattttttctgacgctaacatagcttcataatcaaaatcatcagctagtgaactcagtaagtcttcaaggtttccactttcttcaccaatatatacacttgaagttaatttaatatcaaatccatcaatcattccaattgcaactgacaatgcctcaccatttctaaccgctttaatagagttatcaaactgcgtttcaatatatttattaccaatcgtagattttacgatcaccattgcattaacaattgaaatcccactagaatataaagagcataaagttcttgcaaatcttgaggtataaattattttcattagtttcccaattatcggcatttttaatttaaagcgatcaaactgatatttaacttttggtaattgcaacaatgacacaattattaatattaatactaggatgccaatcaacagtgtgtaccagtaactcataataaatttactaattataatattgatttctgttattaatggtaattccattccctcaaacatactaaagaacgatggtaacacagctgtataaacaatcaataaaacaacaattgtaactattcctaatatgactggataagtcattgctgatttaactttatttttaatcttattatcatttgtaaattgattatttaagaccatcattgtatcttgcatgttcccgctcgcttcaccagatcttaccatttgaattaatatatcaggaaaggctttcccctgttcttttaatgcatctgataatgtttgtccctgctgcaattttacatatatatcattataaatcgcttttagtttcttattatcttcacggcttgctaaaattgaaaccgttcgaatcagcggtaatccagaattcatcattgttccaatctcacgacaaaaattagctaattccttcaatttcatcttataatttttagtttcttctttagttatatctttatgagaaatcaaatacatatctttaacacgtaaaagctgactaagttcatgctcatccctagcctccgtttttcctgttattttctttgcgtttatatcacgtgctacatatttataaattgccatttctcttcctcacttataaattaaaaaatgatagatacaccctaattatttcatttccatataatagtgctgtaaatatccctaaacacaaatatggtccaaaagccatgtgtgactgctcttttgacttttttgttaccatcaaataactagcataaatccccccagctaatagtccaataaaaccagctaataaagtatttatccagccaagcataaatccacaaacaaacatcagtttcatatcaccaccgccaaaacagtctggtatggctaatgtcattaataacataaacccactaactgatgccattccaataacacgactactaatactaatttgaggctctaaaactgcacagacaataactggagcaaccaaagcaataactaatccattagggatagtcatagtatcaaaatcaatcattgtaatcgtcaataaaatcattgctaaaacaaaactaactaatgtcatccaagtaaaaccataacgataaaagcataacattgctaacaaaccaccacataattcaattaatggataccgtgggctaattggctctttgcaaaagcgacatttaccttttagaaacagccaactaaaaacaggtatcatatcatatggttttaatgtattgtgacaactagggcaaaaacttcgtccattaacaaaatccaaatctcgaggaattcgataaattaatacattgataaaactggcaatacagcttcccaaaataaacatatagatataagctattatcaaaaaatccacattttcaccccttatcaaactactaaaattatatcataaattaatcttccaacctaacataacatcatcttgaacacacttctataccagtaatttaacttttttctgatacatctataatactttcttaaatttataataaatatccctttaaataagttaatgaaagaaaaaccggccatctttaacgacaaccagttttttattctataatttattctaatgtttaatttacttcatcaattttaacatctttatttttcttaactgttgcttctattttcttatcatcatcactaatccatgtaactttgtaagacgtagctttttcttcttttggtgttacattagtaggtgtcggcgcaattgttacatcttctaaacttgttttcttaattgcttctttctctatactttcataagttatatcatcagcagcagttgctttagctcgtgcttcttctgtttgtataacaatataaattgaatgtgcttctgcaacatattttgattctttagcatcatcaatatatcccattaccgctggaacagcaatcgcagctaaaatccccaaaattactaatactacgatgatttcaataagcgtaaaacctttcttatttttagcttttttcaatctttttaataataattctttcattttttctcctccgtttatcatcaatgaatgtctaaaaagttcttaacaaagtaaaaccggtattacctcctggtcccatgcaataccgattcttttctttcttaacataactttttactacagtctcattatatacccgaaggtaaaaaataacaattaatatcttagactaatcacacataattcaactattttaatgtttttcgataatttgtgatgaacccgtgataaatatcattattaatcttcttgattgtctgtacaattattatttttatgttgttttcgttgtctaaaataattaacaagtgaataataaacaggtatcgttaaaaaaattaaccaggttggtgaccaaatattttcatagaatccctcatacaaaaaatataaaattactaatacaggatacgggaatctgttaaggttgcggtgtttaactgcagaaattgccccttcaataattggaacaattaataaaaatatccataatggatgccataactccgtgtataaggctatcccgatataagcaataattgcaagtaatgcaaaaggaaactttgtataatcttcatagtagtaatcccagcctttttctttacgaattttacgccattcttcttgatcatattttttatcatccacaaacacaccagaaccatcgatatgaattcttgaatcttcttttggatcctcaacatgaattccattccagccaacatgaacctcttcaccatcttcaccagtcacatgaatcccatgttttaaactaatatgaacactttcttttttcttttgtttcttatcttcttctgttttttcttttgatgcttgttgattattaccactttcaaattctttttgatctgtttttagtaaatcatccaatgacattccatataacttggcaagtaagattaaattatctgtatctggagatgcttctgctctttcccacttactaactgcttggcgactgattcctaattcatttgctaaagcctcttgtgaaagatttttttcctttcgcaatcttactaatcgatttgcaatttctatattcataaatttattcctccctaaatcacctacattatgcaaaataatgcttggttgctctagatattctagttttcaatttcgcaaccagtggttgcaatatgaccattatattataatttgttcgatgaatacacataaattataatatttgttgaaatattttcaaataataattatcataaagttaggtgatacatttgtatggtgtaaaacacctcctttctggttaatggactgttccgtgcttgcgcagtccattttcttttactaaaaaaaccattttttaaactatacaagtattattaatagtatgatttctaaaaatccttttgtcttatcaaaatataaaaacctcctagtcagtgtttaattatttacactgtctattaggaggttatcatatcatttttgatatttttacattacaattttttagcatcatacgttacttgaattccaaggttactaaaaactttagcatccattggtccgatagaagaagtaatgtgcgcttgggtcccctgtagtttaggtaattgttgtagcgctaacttagctttgtcattattaacagcacttaatgataatgcaatcaatatttcatcactatgtaaacgtggattaacacttcctaaatattcagtctttaaattttgaattggaccaaaggctgttggtgaaattaaatgttcatcatcactgatattagctaaatatttaatagcattgattaaaattgcagaacatgatcccatgaaatcagatgtacgacctgtaatgattgttccatcatctaattcgattgctcctgcataacaattagcttctttcgacttttggtttgcagccgcaacacacttacgatcttcaactacaacctttgcctgattcataacaagttcttgcttattaacttcgtctaatgaacactcttcacgaacatagcgattcattgtattatagtaacgacgaattatttcttggcgactagcttccttacaagcttcgtcatcactcatacaaaaacctaccatattaacacccatgtcagttggtgagttatatggactagttccatatatttcttcaaacatattctttaatactgggaagatttcaatatcacgattataattaacagttactttattgtatgcttcaagatgaaaaggatcgatcatatttacatcatttaaatcagcagtagcagcttcataggctaagttaactggatgatttaatgctaaattccaaattgggaatgtttcaaattttgcatacccagctttaataccgcgaatatgttcatggtatagttgtgataaacatgttgccattttaccacttcctgggcccggagctgttacaactaccagcggcttagtagtttcaatataatcattttttccaaacccttcctcgctaatgattcttttagtattagttggataaccatcaatcaaataatgtaagtacacggcaatatttcttttttccaatcggcttttaaaaatatccgctgctttttgaccatcatactgagtgattactacacttcccacatatagtccctttgctcgatatatttcaattagacgtaaaacatcattatcataagtaatacctaaatcgccccgaaccttattacgttcaatatcactggcagaaattgcaataactacttctgcttgatcttttaattgtaataacatctgcaacttactatctggggcaaaccctggtaaaactcttgaagcatgatagtcgtcaaacaatttaccaccaaattcaagatacaatttatcaccaaattgattaattctttctttaatatgcgatgattgcatcgttaaatatttattattatcaaatcctatcttcatactatcctccaaatatattttatctaaaatattctactttatttaacaaatgattgcacgactttgcattaaatccttcttaaagataaaaaattatcacgcataaaaagatttaccctaagacaaacattaccaatatcaatttcagcagttacaaaaagaagtttaatttcactaagaaactaaacttcttttttatacaaagcaacactttgataaggttttaaacaaaggtttgttaaatcaatttcattataattattaattaaaacttgataattgattacatcaagatttaggagaacatcttgaccataaaaattatttaaaacaattaattcttgattatttaaactacgtttataaccaaatacttgtggatgattttcaagaataggaatatattcaccagtactgattattttatattcctttctcaatttaattagcttttggtagtgataaaaaatcgaatcagtatctttaagtgccgcattcacatttattgtttgataattagtattgacttgaagccatggtgttccatcagaaaaaccaccatttacactttcatcccattgcattggagtacgtgcattatcccgtgatttatcttgtaaaatttgatgaatctctttttcttcaagaccttgattttttaaaatgtggtaagcattaatgctttcaacatctcgatattgattaatatttgtaaagtaatgattagtcattccaatttcttcgccttgataaatatacggtgtaccacgcattaaatgaattgccgttgccaacatctttgcagaatgaactcgaaattttttatcatctccaaatctagaaacacttcgtggctgatcgtgacaattccaaaataaggcattccagccttgtccttcttgcattcttacttgccacgtattcaaaagttctttcaattcttgaaaatcaaatggcattgatgtccatttttctttattaacataatcaacttttaaatggtgaaaactaaaaaccatatctaattctttattttggggattagtataaccaatacaattttcaacactagtggctgacatttctccaaccgtaatacaaccagctactcgaccaaatgaacgggtgttgacttcatgaagatatttatgaactttaggctgatcgcaataaaattgttttcccaatccatcaggactatctgcaaaaactcgtttatcaatattatttatgacatcgaaacggaatccccgaattcccttttttaaccaaaagttcacaattttaatcaattcatttctaacttcttcattctcccaatttaaatcagcttgtttttcatcataaagatgtaaataatattcatcaaattcaggaacatatttccaggcttttccaccaaatttagaatcccagttagtaggcaaattcccatttttaccttttttaaaaaaataatagtttttatatttcgagtttccttttaaagcttcttgaaaccaaatatgttctgttgaagtgtggttaaataccatatcaaacattaaataaatatttctttttttagcttctgcaattaataattcaagatcttccatggttccaaaaattggatcaatactataataatctttgatgtcataaccactatcccgttgtggtgaagcaaaaatcggacacatccaaatcatatcaattccaagtgtttgcaggtaatctaatttttcagtaattcccttaatatctccgattccatcaccattagtatctttaaatgattttggataaatttgatagatgactttatcttcgtaatacatatttttcctcgttcctttaatcaattttaataatttctgtttctaattttttgatgttacaattttcttttaatatactaatcttttctccacttgtaaaaataaccggtgagactattgacttcccatgttctttaatataagcaatatcgactttagctaatttatctccttgttttatatattcaccaactttaacaaatgattcaaatcctttaccttctaactgtactgtatccattccaagatgaatcaagatttctacaccattattacctcttaggccataggcatgtttagtaggaaatgtcattacgatttctccgctaactggagctagaacatcactatctgttaattcaattgcaaatccatcacccattgctttggttgcaaaaacttgatcttctacatcctcaatcttaattagttttccagtcattggtgatacaaatttctcattatcaattatatctgtttcaattcctaagtctttatctgttaatttctttttaccaacaatatatgttaaaacaaatggaatcacaattgcaataatcatcgcaatagcaaagtttcccatatattttggaataattgataagattccaggaattccaccaactccaactgaagttgccattgtccctgttgctaccgaaaacgttgcggcaattgcagaaccaatcatcccacacacaaaaggaaacatatattttaaattgactccaaacaaggcaggctcagtaacccctaaataacaagaaatacatgccgggatactaacttgttgagctttttcatttttcttttgcaaaactatcatcgctaaaacagatgatccttgagcaatattagataatgcaatcattggccataagatcgttcctttaaacatacttactagttgcatatcaatcgcattagtcatatgatgcaatccagtaattaccaatggtgcatatacaaaaccaaataatgttgcaaataaccagccaaagttagatgtaagaccaccataaaccacatcagaaataaagttaccgattacccatccaattggtcccactacagtatgcgcaactattaccgcaggcactaacgaaaagaatggtacaataatcatactaattgcttcaggcgaaacttttctaaagaacttctccaaataaactagagtaaatcccgccatcattgcaggaataacttgtgcttgatacccaatcatctgtacttgggcgaatccaaaatcccagactggtatatccttagctgctgttgaagctactgaataagcatttaataattgtggagaaactaatgtaattcctaaaataatacctagaatttgactagttcccatctttttagttattgaccagcaaataccaacaggtaaaaaatggaatactgcttcaccaattaaccataaaaatgagtctacaccactccaaaattgtgtaatttgaactaatgtttttgttccattttcaaacattgcaattgaatcaatcacatttctaaatcctagaatcaaccctccacagatcaatgcaggaattaatggagcaaagatttcccctaaatttcccattaatctttgaagccaggtttgatttgatttagcatcactttttacttgctctttactaaccccttcaattccagcaatcttaataaactcattataaaattcttgaacatcattaccaataatcacttgaaattgaccgccttgtgtaaatgtacctttagcactccccaaggtttcaatcttgtctacatcagctttactctcatcccctaaaacaaaacgcattctagtaacacaatgactaactgctctaatattttctctaccgccaacaaattctaaaagtttacttgcatcactactgaattttcccatcttttttctcctttttttacatgtacgtacatcttttgtaattatataataacttgtacgtacatgtaagtcaatacatttttaataaaataaaaaaggaagctaaacttcctttgtaattccaaccatcttcaataaatattgtgcatttgttgtttgacttcgaccatatttaattaaataatcgaatttaatcttatctccttgataatattcattaaaatgataattactgcatgaaatctcattttctaattcacataattcaaaatcatgagttgtaataaatgtgaaaatattatttgttgacaattgcttgaccgtttcttgtgctccaatgattcgatcttttgaattagtacctttaaaaatttcatcaattaacgcaatcatcaaattaccttgacgattagcttcaacgatttgttttattcttaataattcagcataaaatgatgaaatcccattaagatcatcttctattctcatcgaagtaaaaatttgcatcaatgagcaatcaaatgattttgccataactggtccgcctgcatacgctagtacaaggttaatcccaatcgtccttaaaaaagtcgtttttccagacatatttgagcctgtaattacacatacttggtgattcatcataaaactattagcaacagcttgttcatttggcatcaatggatgataagcttcaccaaattctaaatatgtagtttgatcaccatgaaaattcgcaaaacaagtaacatctttagtatggagtaatacttgtaaactcgttaaagcttcaaattcgccaattgcatctaaccaccgctcaattgaactagcatattgcttaacccaacgatcatatcgttctttacaattgatatcccataacaaaagtccatttaataaaatgaatgccaaaagattattccgttgcttaacagcgctactaatactttttagttcatcaaaagctatacttgaagcctctaatcttgcttgtaactctaccaaaaaaggtgatgtaaaagtggattgtttaatcagatgactaatattttgataattattcaagcaatgtgataatttagaaacttgctcaaaaattattccatgactgtttagatttataattgcaataatcagttgtccaaaaattagcactggcactaaaattactgataacttgaaataaaattcgaaaagaaacatgacaatggtaataatcgtaagtatcggaattaaatatttagcaaacccccagctccgtttaactttattttttcctaaattattaacaaaatcctcaataattcgttcattaactttaggtttttcaagcattctgccataggtttccaatgataaaacaaaattattattattcgataattctaaaacagctttttgctcttcaataatacctttttcattaaaacttgtacgcgttaatttatcaagcaaacatttcttaccacgaatcgtacttgcaacattaaaatattggaacaatgaattctttcccactaaatctaaatccttcatcaccccagtaacattatcaacatagtctagtcccgtttcatcaaaagctttccaatcattattatagcgatctaaataacgttgaattacaattgcttgagcatttaaataactcaatcgttccgttattttactatgaataactattaaaataataaaaatagcaatccaaattaatgatgaatatactaataactgattattagtaaaattgcctcctaataaaaatccaacaatcaataatccaataattaaacgagcaattgaaatttttaatgatctactatctaaattcgctttttcttttctaatattgtcttggaataataaataatctttttgtgtcatagcccctcctaaaaaagaactcattaaagttgagtccttcttgcaaaatcaacaaatctaaacttatcaggacgatgtttcgaaatcgtatattgaaacaatgaagcatcttctaaatatgtataagatttcacacatactaatagatcatattcatgcatatctaataaattcttttcctcttctgtcgccttaacaactgtaaactcttttcttgcaaaactgatttttaaacccaattcattttcaatataattatatagtgaatcagcagcaattgtttctgttatattaggaacaatattagcatttaaataatcggtatccaatattacccgctcaccatcaaatgaacgaattcgtcttattttataataattaccactatccatatatagttcttttttcatttgaacatcaactgggtttaaagataattcaataactttagtaacaacctcgctattaatagtcttggctagttctttaaaactcattacgccagaaactggaaatgcgactttatcaacatctaaaactagtgatccttttcctttatttttttgaatataaccattttttaataaaatatccaaagccttacggatggtatcacgagatgcattatatagcttcattaactcattttcactaggcaaatatgaatgtactttgatttcttgtttatctattttatcgattaaatcctgagatattctttgatacttacttaacaccttaaccacctctgatacattatatcaaataaatttatttgtgacacttaattaattcttcaatacatccatctatcccgtcaactaaatatttggcaacattcttgactgtttgatgagaacgattaaatgtaaaagaattttcaacactctttaacatcgggatatcgttccatgaatctccaatagctgccatatcttcataagctaagccatagaactcaattattcgtttaatccccttccctttagagcatcctttcgcagcaaaatcaaggtgccgctcattttgataaacatcaataacatcaccaaacatatcaataattttagtgtattctttaccagcttcgtcattatttttaaaatgtaaagaaaaagcttcaaactgctccccaacttgattaaatgatgtaattagtttaacccgtggagataaatcaaaagtgcgattaagtacatacatatctccttggtaaacaatactagtatcgacagcctcgtattgttcataaatactttgagcaatttttttatctataaatttttgataaattaaatttccttccttatctaatatttttgctcctgaacatagaatataaaaatcgtaatctatctgatgaggattaaaatcctcaattcctttatatgaacgaccagtacaaactccaaataaattacctagactttgaaaatgtttgatggcttgaacatcctctaaccgataatatgaaccactctcatcgtaaaaaaatagtgttctatcaaaatcacttgctaatgctttcattttcatccctccattatttttagtacaacttttttctatctcgattgcttgattttcaaatattgacacaagaaaaggcgtattactacgcctgtagataagccaaaatcaattcaatcgtattgttgatagcctgttgatgagagcgttccatcccatgagaagcatgtactcccggtccaatcaaaccacccttaatatcattaccacctcgtaaggccgcactaacatcactaccatagaatggataaatatctactgcatagttaagtcctttagctttagcaagttcaataaactttgaagtaatcccataatcatatggtccactagagtcttttgcacatatactcacatcatattcactacatgctaaatcatcgccaatacatcccatatccactgcaatcaattcactaatattttcgggaatactagcactgccatgccctacttcttcgtaagttgaaatgatcataataacattgttggcaggaacaatattcttttctttcaattcttttaaaacagtaactaggcaagctacgcttaatttatcatcaagaaatcttgatttaagaaaaccactattagtgtatgttgttttaggatcaatagcaatataatcaccattatcaatccctaaagctgtaacatcttctttattttttacaacttcgtctaatcgaatatgcatattttcacatttacgaatagctgtttttgattcctcatatacatgagcggcaggataattgcttaaaatagttcctgtataaattttgttttcacgtgtaattactcgacagtattcaccatctagagtcgggacgattggacccccaacattagtgaaagctaattctccattatctctaatacttctaaccattaagcctagagtatccacatgagcacataaaccaattgttttatcattcttgccatcaacataaatataaagatttcctttattattcattcctgtacgataacctaattgttcaacttcatttttaacaaattcaataacttctttgcaataacctgtaggactatcaatatttaatattttagttgcaaaatctattacataattttccatcatttaactcctttattctcttcttcaagtatataactaattactaataatttaaacaataaaaacagccttatttactgatacgttttgaataatttaaaaggattagggctactcttttaaactttctttgaaatcgcagcaattttaagactgttttacattattaataataacaaactacaggacaattaacttcaatactattatataattgtgaagcaattcccgtaggtaaattaatacaaccatgagaaccattgttcatataaatagttccaccccacttagaacgccagcttgaagaatcatgtaacccgattcctttattaaaaggcatccaataagaaactggagtttcatatggccatgttccatcaggtaattttgttccccgaagaacacgatttctttccttattatataaataataggcacccgctggtgtacggcgatcagcaatattgtatgtaccagaaacaatatctgactctaatacgatctgaccatttttatgataccacatatgttgccctgataaatcaatttcaacaaaagtatcacctaatccaccattatccgaagaagcttcacgaccagttgtaacaggtgttctgacacccactttattggcataaatatcttctaataaaccgcttatttccttactattttggagtcttaaaccataattaccaccgctaactgtaatcgtccgattattagccccaacaaaagttcggcttccaccaacactgttaattttcttcgctaaacttccaacaaagtcagttactttttctttaaatacagcatcatcacgataataattaccactttcatctattgataaccaagtaaccaaagtactaccatctaacactacatctccagaacgtgttttataggttatcgccgcagatgcatactttctagctgcatctaataaattttgtaatttcgcatcattagcttttacagcgggttctacataacattttttctccgttaaatttaaactttctttaccttcactaaaggctaactttatttcactaattagtttttcttgatcaatcgttgaaccattgacctcgttggtgatggtaaactcattatttagatattccactttagcatcgaccggtgccacttgcacctcttcttgaagatgtcccaaagaagccaccttagctcttaaaactgtttcatcaacttcagctagatcattaactacatttttcgatttattaaaataagctccaatccacccaaaagaattttgctttttcaaaatattcttaacattattattactattatagcgaactccacattcgcttcctgaaactgtttcagttgcttcatcattaaaaatcaattttaaagaacgagcatctatttgttccgctaacttttcattcgcttcagttaatgttaaaccactgacattgatatcattaatgtatgtaccacttaaaaacttcttattgaaataaaaacttccaattaaataaataatgactaataatgatactaagattccaataataataatctttttttgtacccctgtttttttccctgatcttacttttttagtcatttctgacttttgctttgattcaatcgtatcgtttgtgttactcatattttcctcttgtttatccatctaaattctcccaatataagcgattattttgtctattagcattctagcattttccccttaattgtcaaccaaaacagttgaaaagtatggtatttttaagaattattaataatttattggtaaatcatgttgtttttttagatataatcgtaactttttgatatctccattatgctgataaccatgcattttagcaatctttgcaccttcaacattagcttttatatcgtcaataaaaatacattcctcagcctttaaattaaattttgaaagaaaatgtttgaagatttcaagatcaggttttaataattggtagcgtgcagaaatataaaaatcatcaaaatatttaaaagcttcgatattttggtaataatcatcaaattggagactgcaattagataatagataaatatgataaccttgctcttttagttctttaactaatgctaccatttcagcaaaaggctcaaaataatcataccaatgcaataatgcatgtctaatcaactgcggattgtcggtttttaattccttaagagcttcttccacggtgagtaatccttgatctagcttttgccactgttttgaagcaaataattctctttcaattacatcttgttctaaactatcatttgataatttactagcaatatagtgcggatcccaacgcaaaataacatttcccatatcaaaaacaatatttttaatcatgcattaacgctcctaaaatagcgacccctttaataatctgttcattagttggagttgaaaaattcatccgaaacgattgacatggtttattatcatcatcatagaaagcatttcccggaactactgctactttatgttcaacagctcttttaacaaactccggcatatcaattcgttctggtagagtcacccaaataaacattcccccatcaggaattgtccatttacaatctgggctgaattgttttttcatttcttccaacatcaaattacatttttgctcatatactgcctgtaatttttttaggtgtacctccatatccgtttcatttaagaaacgagccattacactttgcgcccaagcatttgtatgaacatcatttgtctgtttagcaactgtgcatttagctaatagatcttgatgaccaatcataacagctacacgcattcccggtgcaataatttttgaaaaactagctgcataaactactaatccttcatcatctaatgacttaattgaaggaattgcatcatttctaaatcttaaatcaccatatggattatcttcaagaatcagcacttgatatttttttgctaatgtataaatagcttgacgtttttctaaagaagttgttattccagtaggattttggaaattaggaatcaaataaataaattttggtttttgcaccccacttaaaacggcttctaactgttcaagattgattccatcatcttccatatcaattccaactaatttggcaccattacttttaaatgcatttaaagcccctaaaaagcttggattttcacaaacaactagatccccttcattacataaacatttagataaaaaatccatgatttgttgtgaaccagaagtaaccataacaccatcatagtctttcactactgtttcatgccgtgataaaaattctattgctgcttttttaaagcttccgtcaccttcagtaattccatactctaaaatagaattaggacaagtattaaaaatatcatcactaattctttttaattgttcaacaggaaaagtctcactagccggatttccaccaccaaaactaataatctctggatcattcatcatttttaaaatttccctaattgctgatgccttaacaccactgatccgatttgaaaattcaaaattcatttaaatatacccccttatttgtatactatttattataaaccaaacatttactaatgcaaagagcaataatatggtttataatatataataggatgtacataaaggaggaattccatgcaagcacttttcttagttttacacaaagtagaaaaattagatgatctcttagccgcattacaaaaaagtggtattaacggagggacgattattgaaagcaaagggatgcttaatacattaaaaagtaatgataattttattatcgaatcattacgaatttttcttgaagatccccgtgaaacaagcaaaacacttttctttattttaaaaaatgaagatgttgaaaaagcaaggaccgttattgataaaactttaggcggcatcgataaacccaataccggcattatgtttggtattgatctaacctttgttgctggactaaacattgaataatactaaaaaaccttagcattttattttgctaaggtttttatttaccattgtaacattgtcatatactcacttggactggatagtgcttccttatatgcagtaatcttgaccattttttctttttttccatcaattgaagcgatatacacactatcataatcattctctaacaacaatgattgtttatagtaatcaagacgtgcattagcaatttgataagaactctttccttcactatctttatactcaacaatatcaccagttaaaacaagaatatacgcttcatgagtaggtacctcactgctgttattcaataaaggagagccctcacctggcggtaataactgcatcactttattaaaaacttgacgatttgatattttatagtttaatacttcttcatctgctttaatatccattgaaacttcttgatacttatcatcaaaatccttattacttacaaaatctaataactgaacttttaagacctgattttcaacaactaatccacttaatgtttcagttacttttttttctggttgttcactttttgtcccaccaaactttaaaactaaaaaagttatcaatagtaacgctattatccccaataacattaacgcatttttcgttaatttcagaggttttcgtgccataatcacacctccttttacttattatatcatatctcctgcttatttttctttacaagttaatttattctctttagcattttttgttaatttttcaaaagaaaccgttccatcaccatttaaatctattaatccaacctcattaagtttttttaaatcaccattttctatatcaattataaattcctgacgaacaatttgatctttagcagtaagctttatttccaacccatctatttctttatatacatttaattgtgattcaagtgtactaactaaggtctcatcatcataatccgtatctctataatcattaatcgtcacattcacgatcctgataaccttatcgcctttagcttcataagtattttcaatatcgccataatcaaaacttcctttacaaactgttatactcttagtagatgaatcactacatccagttaaaattcctgctatcatcattactataaatatttttttcatttatgatcctctccgtcttttatattcatcgatcatgtaaggctgaatttccggatatgtccagcattcgggcagttccttcgataaaaatattttttctatctcagaatcaggtaaatccgccattttttcaatttcggcataaaatattgttccaaaagactcttttgatccagttttctcaacaactccgtagtcgcaaaaacgttcaagcgtataagtaacagctcccgtttcttcatacaattcacgtcttgcacatgcttcaatgctttccccattttcacgatgtcctccaggtatttcaaatgtctttcgctgtttatgtttacaaaatacccactgttttaaataacggctaataattaccgcaaattttaaatcatgctccgctacagattcataaaaagatactttcatctaaattcacctacatttctatatgtatagattttatcatatttagacttatttagctgaatttttcaaaaactttcaaaatataaaaaccatggtaacactaccatggcttaaatacattataataaattctgtaaatgttttacaatttcattttcaggaacaaaaccagtaatctggtcaactgctttaccatctttaaaaataattaaatttggaattgcctgaaccccataacgcccggcaatatcactagaagcatcaacatttaatttataaaaattaacatgctccatcttttctgctaacccttcaataactggagataacattttacatggtccacaccagtcagcataaaaatctactaaaacgataccgctagcaattgcgttatcaaattcattactatttaaaattttcatttttatcacctcattaacattatgcctaatctataaataattacaactaatttgctttaattttatcatattcttgtaaagcaagcgacattgggtcattatcgtcaaaagaaatcgaatcaccttgataactttcactaccatcattagaacgcttaaatctagtaatttgacccggattatcatagtcaacttttaataataaattagggttattttcaaactccgacagctttctttgaagaatatttttaaataatagaatatcattttctgttctaatttcattctcactttcacctggcaatgcataagtaagatattgatatgtgtcaagcttattaataatataataataattatcaaaccaactttttaaaagtgccgcatctaactttttgattaccattaaatattcttgatccgaaatttgataacctcttgttaccttatcaccattatccttataataagtaatttttaagttatgactgccataatcacttttttgttttaaaatttcctgatgaattgccactactgtatcaattgatttttgatcagttaatttactattaatcttgttgtacccaaaatttgaattaatttctactgctttaatatcatgaggaatataattttctaaatatccttttgaaccaataaaaattacaattgtaactaaaacaattaatgttccctgcactatgcacaatacatacctaatacgttttgactgaataaattgaataataaaagtcgcaacaaaggttgcaataatattgataataataaaactcttcaaagattgaacaggaatatccaaaatagaagtaatcagccaagaaactgaaataatacaaattagtttaattacttcaccaatgattttataagtgaaaccatgataattgttaacacactcccgattactgcttgctaaaaaagccattataaatataactagaccataaccagcatacagcaaaagataataagaacttaaaccactaagtccaccaataaataatcgaaaagcgggcaaaataatacttacgacctccattgaaaaatcagcactaatgattcctctaacaaaagtctgataaacagaaaataaactcatataaataatgaatggcgatatattaataacaatttgtagaataatatccataattactgatgtcgttaaataggcagctagattacctaaactataataaatccaaatcattaaaattgctgaagaacaatttttaagtactaatccttgtcctaaaataacatcaacaatacaatagattatgacaggtataattatgcacaataatccgcttaaatatctgatcataaaactttgtatttttgtatatggcaaagatgaaaaatgagtctgttgggtttgatcaaataagtaacttaaattaaccatcggaacaactaatgaatagagtaagataattagataaaacattcctacaggaacatcagagtgaaaagaaatcagactgattaccaaacttaaagctagaaaaccactaaaaataacaactgtattttttagctgttttaaatcattttttaataaactgatcatcatctttaaccacctacctttatatcattaacgatcacgccatcatcacctttctttaaggtaaattctaatggataagtatagttatttccttcttttgtaacaacttcataggtaccttgataaataacttcatcattactaaaggctataactgtgctatcaccgtttggatagaccatatcaatcgtttcgtgactaaattgtgtactcactacggctttgatttgttcttcaaactttgttgaatcactattaatatcatcaataacatctcgacaattttcaataaaaacagctcgttcgatcaactcatcgctagtaataaaattcgttattgcttcattactgcttattaaataattgacactatcaggatttaataaattatatgttttaatactaaatatatttttaggtttgatttcttgatttggcaacaatttaatcaattcttgaatttcctctttatttaaatagactgcataatcattaacataacaaattaaacttttttccttttttaaaccctcagtataattaagcagcttatcaaaatacttatttcctggtccattaaagaaatcaattactgcttttttattaatataatagatactatagctataataatcatcatctaatccatgttcatattgataagtatacatcattgctaaatcttgttgttcatcatcatatttttcaaaatgaagatcatcacgatgtttactcaaataattcaagaattcctttgtaacctcattatttaagcttaagctaagatactcctgattaccagctaattcagctactaaatcagcagtaacttcatatctcgaattattaattcctgaaagatattgcttattggcaatcataaaattagcaccaaaaacaattgctaaaacaggtacatagattaataaattacgataaacatgtcttcctttaaaaataatttcaacgattatcgctacaatcatcccaatcaaaatatagatcaaaaataaaagtgactgacctttgaatccatatgtgatattaatttttgatactaataaaatgactccaaaaccacatattgttacagcaataatcaaaatagcttttaaaacaataataattcggcgaaatactaaaggttctccaatatattcattttcacgatttttataaacataatagctgcagattaaggtaacaattcctaaaaataaatggaaaaatatatgtggatacgcactataaataaactgcattccagcagctaacggaaaagtaagataaagatatgtgtcattaattccaagatcaagattacttggaactaatttaggactaatataaataagccccaataataaaattactggtaatgcatatgctgctaaactaaacacaacttgtcccaaacgattaccagacagtgaacaaactaaataagtaagggtataataaataaataacaaaagaaatatcgccattataaatcttataaatatatttccttcagtccccgcattatttaatcctaaaaacatcatcaaacctaatccctcaatcaataatgtaactagcgcaattaaatatccagctaaataatttgtaaaccaaacgcatcttgtcgtcaacggtaatgaacacatcattgatgatttcgttttattaacttgataactctgaataaaacaagggtatatcgttgttagaacaactgcacttattccatatacaactatacaaatttgactaaaaccactattagaaccagaaataagcgataaaataaagactcccacaaaaataattaatgatactttagcaggaaagagattatttttaatgatattttttagtaagggaatattaacccatgacttccttgagttcatcatattctcctcctaaagtaaataagaaaatctcttctaatgataatgataaagtttcattaattaaaggacaatacttttccacagtacgattgattgcttcaatttcaccagcaacgatcaaagtatgaacacgtcccatcatttgatgagataaaacttttaattctttctctaaagcatacatatcatcaccacactctaagacgatttgtaatttatgatagccttctttaagatgatctagtgcttcttcaaaaacaattttcccattgttgatcaaagcgatatgatcacacatactatccaattcatttaaatgatgactagaaataaaaattgtcatatttcgctcacttacatcttgaatcaaaatatcccaaataactttccgaatatgtggatcaagtccatcaaacggctcatccatgatcaaatattcaggcatgatcgctaaagccaaaataaacataacttgctttttcattcctttagaaaatttactaaaattttctaaactatcgtgcttaaacattttcatcaatcttaaataccgtgcctcgttaaaacttggataaatcccttgatataattctttaatatcccgaatattatgtccgaaggtatcaaaaaattcatcggggatatatactaattttgcttttgcttcaggattttcataaatacgcattccttctaattcaacaaatcctgtatcaccttgataagcacctactaaatgacgaatcaaagttgttttacctgcaccattttcaccaataattccataaattgaacctttaggtatatttaaagtaatattgtccaaaatttgtttgtgatcaattttctttgataattctttgactaataacattattttccctcccaagtctgttccataaattggcataattgttcaaaggtcaaaccaatatatttacttttagtaacaatctcttttgtgagaactttaatttgttgttcaaacaacttcgtttgattattttgttttgagctaacaaaacttcccttccccggcaaggaataaataaaaccttgctcttctaaaagacgataggctttaacaacggtattaggattaatatgaattgatgaagataattcacggacagagggtagtttatcgtccgcctgcattaaccctgtcgttatatattcgagcagctgtttatagatttgttcataaattggaacactgctattattatctatttgcataataactcctttcctactacattcttacaaatgtagtataccaaatatataactgtattacaatatataatacagttatatattgtaatgcctttcatttaattatttttataataatggttaaatagtttgcattttttattatttcaagtaaaatatggtttagagataggaggtttttaaatgaataaagtagcaattatcactgatagtaattctggaatcactcaggctgaaggtacaaaattaggaatcaatgtactaccgatgccatttactattgatggtcagaccttctatgaagatatcaacttatctcaagatgagttttataaaaaactaatgacagatgctgaagtttttacaagtcaacccgtagttggtgatgttagtaaactttgggatgaagtattaaaagagtatgatgaaattgttcatattcccatgtctagtggcttaagcggctcttgccaaactgctttgatgttagcaggtgaatatgatggacgagttcaagtcgttgattcacaacgcgtttcagtaactcaaaaatgggatgttctggatgcacttgaattatctaaagctggtaaatcagcaaaagaaatcaaagaaattcttgaagcaaataaattaaatgcttctatctatattactgttaatacgttagattatcttcgtaaaggtggaagaatcactcctgctgttgcaattttaggcggaatgatgaaaatcaaaccaatcttacaaattcaaggtgaaaagctcgatactttctctaagaccagaacaatgtctaaagcaactaaaattatgatggaagcaataaaaaaagatattgatgaacgtcttgatccagaaggaaaaggaaagaatgttcatgtttgtattgcatatacatacgacgaacagccagcattagaattaaagaaagaattagaagctatttatcctgattcaacaattatttgtgacccattgtcacttagtgtttcatgtcatattggaccgcatgctctagccattgctgcatgcaaaaagattatctaggcaagaaacttcgtttcttgtcttttaatatgtgttataatacttaaaaggatacaaaatataattaaggaggttattatgcaagaaaagcctaatacaaataataaacgacctggcaagtcaccacaaaaaaatcataataataaaagtaaatctcgaaacaacacgccaaaaaaagcggtaaataaatcaagacaaacaaaaaatagtattgatactaaggtatttgcccttggcggactaaatgaagtcggtaaaaatatgtactgtgttgaacacgataatgaattattcattattgatgccggagtaaaatttgctgaagaaggattaccgggaattgattacgttattcctgattactcgtatttaaaaagaaatgaaaagaaaattcgtggtttaatgattacccatggtcatgaagatcatataggtggaattcctttcttacttcaagtagttaaaattccttttatttatgctacaccacttgctagtgccatgattaaaagaaagttagatgaaaaaagactaactaatgctacaaaaattattcaaatcgacgatgagtatcaaatcaaatctaaatattttaatattggattctttaaaacaaaccattctattccagaatcaatgggaattattattaatagtcctaatggacggattgttgaaacaggagattttaaatttgatttatcaccagtcggtgatccagcagattatcaaaagatgtctttcctaggtgaaactggggttactttattaatgagtgattctactaattctgaagttcctactttttcaatcagtgaaaagaaggtcgctaatagtgttcaagaggaatttagaaaaacagagggacgtttgattgtagcaactttcgcttccaacgttcatcgagtacaacaaattgtcgaagcagctgttaaatttaatcgtaaaattttagtatacggtcgttcaatggaaaacaacattcaagtttcaagagctatgggctatattaaatgtcctgataagttctttattaaaagtgaacaagcaaaaaaattaccagataatgaaattttgattttatgtaccggttctcaaggtgaagcattagcagcattaagtcgaattgcaaatggaactcataaatatgtcaaaatcaaacccggcgatactgttgtcttttcatcaaatccaattccaggtaacgcttatagtgttaatgtagtagtaaataaattatttagagctggtgctaaggtactaacaaataccgctttcaataatttacatacttccggacacgcttctcaagaggaacaaaaactgatgatgttattgacaagacctaaatacttcttccctgtccatggagaatatcgcatgttgaagattcatgctgaattatctcaagatgtcggtattccaccagaaaattcatttgttttatcaaatggagatacaattttattgaataatggtgaagctcgattaggtccgagaattcatgttgaagatatttatgttgatggtaatgatattagcggcttatccacagctgtacttcgcgatcgacaaatgttatctgaagatggaatggtttcaattttaattagtatggattctcgtagtggaaaattattgacaagaccagtaattatctcacgtggtttcgtatatatgaaagacagttttcacatgattcgtgaagctgagaagttagttgaaacaaatttatcaaaattgttacaaggtaaaactactttcggagaaattaagaatactacccgcgatacattatcttcatatttttatcgcaaaactaaacggaatccaatgattattccggttatcatgaataaaaaatcatgagaaaaaaaataagaacgattaaactactattattgataatcgttattatcgggagcggttttggttattattatagccgatatatcgctcctgatagttattctataaaaaaaacgactattactaataatagtttacctgatgaattcaagaattttgaaattggttttatcagcgatattaatctccaaaaaagtagtgatgttactagattaaaaaaaattgtcacttcattaaacaaagaaaatgttgatatggttatttttggtggtgacctcttttcagccacgccctttgataacgataaggtaatcgaattattatccaatataaaatctaaatatggtaaatttgctgttcttggtgaaaaagatttagcttcatcaaatgatgtcaatgccattttaaatgagggtggttttgaagttctgcataacgaatatcgtcctatttattttaatggatctacgattagtctttttggtcttgagggaacaggagaattaagtggtctaattaatgaaaataatagtgaaagttacaaaatagttgcagttcatgaaccagattattttaacacgacttcaaataatgaaattgctttacaactttccggtcatacaatgggtggttatattcgtcttccttttattggcggactatttaaaaaaactaacggtaatacttatgttagtggtgaacacactaaatcaaaaagtcaattattgatttctaacggtttaggtatggaagacggatacgaatatcgtcttttctgtcctaatcaaatcaatattgtgacattaaaaaaataaaggctctaaacctttatttttttatttctgtcccaaccccgctagttgtaaaaatttcaattaataaactatgttccagacggccatctaaaatatggactttctttacgtcctcctgaactgcttcaagacaattttttaattttggaatcattcccccggttataattccttgttcaaataattcagctgctgactctgtattaattactgatatgcgtgtactaggatcgctcggattacgtaaaactccctcaatatcagttaaaaatactaacttactcgcttttaaagcacgagctacacccgttgctacatcatctgcattaatattaaaagcattatacttagaatctaatcctactgttgaaataatcggtgtataatccttttctaacaatgtttctagtaaagtaacatcaacatttataatttccccaacataaccaatgtcatccccttttggcattgctttttttactgtaatcatattaccatctttaccagataagccaactgcatgggttcctattctttccatatgttgaactaatcctttattgatcttccctgacaaaaccatctcagcaacttctaaagtttctttatcagttacccgtaaaccatttttaaattcacttttaatatcaactttctttaaccatccattgatatcatttcccccaccatgaacaattaccggtttaatcccaactgattttagaaccgcaatatcttttaaaacactgtgtttaataacttcattagtcatggcactaccaccatatttaataactacgatatctccatggaatttttgaatataacttaaagcatctactaatacttgtgctttattttgctcaactgtatgcacattatttcccccttaattaaatttttattatgaacgatagtcagcgttgattttaacgtaatcgtaagttagatcacatccccatgcaatcgctttacaatcaccattatgaatatcaataattgcttttacttcgctgcttgataagatcttagttgctaattcttcactataatcagtcgccattcctttagccaccaattgcaattccccaaattcactagcaacgctcaaatcaacattatatggatcaaattgttcaccagaataacccattgcacataataatcttccccagttagcgtcattgccatatactgctgtctttactaacggtgaagtacaaacgcttttagcgattactttagcctgttgaactgtatcagcattatgaacttgaacttctaacaatttagttgcaccttcgccatcaccggcaattgctttagctagatattcattaacataatataaggcttctttaaatatttgataatcctgatcttctataacaatttcttgatttccagctaatccattagctaataacaagactgtatcattagttgaagtatcacgatcaacagaaaccatattgaaagtatcaggaattacttctttcaatgccttatttaataattccttagaaatattacaatcggttgtaataaatcccagcatggttgccatatttggatgaatcattcctgaccccttacagcaagcccccaaagtaaccgtctttccaccgacttcaatttcaacagcaagatgctttggtttcgtatctgtcgtcataattgattcagctacgattacccctgcttcttggctctcacttaataacggtttaacaattggtaccccattaatgattttattcattggtaattgcttaccaattacacctgtagaacaaattagaacttcctctttttccaatccaaaattatctgctacagtttgagcaaactcttcgttacattttaaaccttcatcgccagtacaagcatttgcgaccccactattaacagcaatgattctaacatgatcataattatcaacgatcatcttatcccataacactggtgctgccttaacaatattttgggtaaaagttcctaccgctttggcatcaactttactatagatcaatgctaaatctttttttgcttttttaataccaacatgttctccagcacctaaatatcctttaggcgaggttaccgttccattctcaattattttcattttattttcccccttataagattgctggagcaagcattagcccctctttttcatctaatccaaacataatattcatattttgaattgcttggccagctgctcctttaactaagttatccatagctcccatcataataactcgatttgtccgtggatcaactttataattaatatcaacaaaattactagccttaacactacgtacttctggtaagaccccagatttcaatacccttacaaaatactcatcatcataacattgataagcctttgcgacatccacttcattaactccctttttaagttttgcataagctgtaattaagattcctcgattcattggaattaaatgaggcgtgaagtttaataatacttcttgatttgccacataacctaactgttcttcaatttccggagtatgacgatgacttgcaaccccataagacttgatactttcatttacctcgcaatataagtttgcgactttagccccacggccagccccactaacaccacttttagcatcaatgatcaaagtatccatatcaattaaatccgccttagctaacggatagactgataaaattgaacaagttggataacatcctggattagctattaatcgtgcctgtttcactttatcacgatttatctcacacagcccatatacagcttcatcaataaattgtggtgaagcatgatcaattccataccattgttcatatgtcttaacatctttaattcgatagtctgcacttaaatcaatcacttttactttgcttaaaacttcctcattaagcattttggcacaaaccccttgtggagtcgcaaagaaaaccacatcaacatcatcaagatattttgtaatatcctcatcaacacactgctgatccaataatttaaaatagctggaataaaccgaactatactcctcatcagtgtaggttcttgatgaaacccacttaatttccacttctttgtgagttaataaaaatcggactaactcacatcccccatatccagttgatcccacaattcctactctaatcatttctagtcctccatttctttgttaaaataaaaaatcgcctcttaaacaagagacgatttaaccgcgttaccactctatttatcataagttgaccctatgatctctttcatcgttaagggtgattacccgaaagcgatactactatttcccactttcctctcataaatgcgcttcatcctaactagattaccagccttccaccaacgccagctcgctaaaaccattattaagactactcttttagtcaccgagtttggttattattatattactaaaaaaaaatttgtcaaatatttatttgaatttccaacaatttaaaagcatgtgtcgtaaacacatgcctataattcttcaaatcttttaattccccaagtatttaacaaatagtagaaagcaatatcgataatcaagaaaagcgctagcattatataaacataagttacagcaccaataaactcatttaaataaccaatataaataccacctataaaaactacaagcgccatcgttccaaacattgtaatcattacagcagcactttgttttacgacaacagtctcattgatccaatcaaatttcggcttccataaattaatcaataaacctaataaagcttcaaaaaccgtaaaaactatagggacgataataactaataaactatctactaaactcaatgaaaaaactacacttccgacaattgaaaataacaatcctggtggtacacataaagctaagtgtagcatcaatttactttcaagaatatctttagttttaattggtagtgatttaatgatccatagacgattcccttccaacgagatcaaagcagcactaataatattcattgaattagtcccaatcactgccaaacataacaatggaactataaattcattcaccaaagcttgatattctggtggaattactcccaacatatctaaaagctcaggacctttaatcaagacagcaccagctaaaacaacggtaaatgcaattcccaaagcagcattcatcatgaccatcggattagatgtaaaatgttttaactctcgtttaaataacgctcccttttggctactaaatttaatatctgaatccttcaatttaactttctttgatggtgctttactagttgcaatactaataaaattcttcgaaagaagatacattacaattacaaatggccctacactacaaactaaatatagtaacaaactcacgacattgacatcactgattgctaaagctaaatgatagattggaaataacgtattttgaatcgcttcaccaatcgatttaccattagctactaatgcaaccaaatattccggaagtttattaatcaaataaaaatagagtcctaaaaatcctaacgataataccatagtaataattgttttattccgtattcgtttcattaacattgccattaaccagccaaatgcacaagataaagctaaggctaataacggcaacgttataatgacaataaggaaaaagagtaattttaaaagatcaaacggcacctgagtaaaataaacaattccaccagggattgcaatcaatgcctcatataaatagttgatgattaataccacaaaaatacgacttaataaaatatcacttgttttaatcggcattgataataatatctcattatctttagcaccataaatttcttgttgggttgtaaaaacactcccaataaagcaaagtaaaacaattaatactgccatgattccaaaatataaccattcataaccaattgccgtaaatggttctaaaaccatattaaacatgtagccaaacattgaaccaaaaacaatggcaatataagcaaacactaataccatcaatgctaatttacctattccggcatttttatttttacttcctttcatcgatctcataaaaattccttgaaaccgaatcttaatcaatgacttaagcattgtcatcctccaactctaggaacacttcttctaatgaatcatccccaatgacatcttgggtgttcccggatacgacaagtttacccgctttaataatagcaattttatcacaaagtttctcagctacttcaagaacatgagttgaaaaaaagattgctccaccacgatcgcacaaatcccgcatcaaaccctttaataaatgagaagccttaggatctaagcctacaaacggctcatccataattattaatttaggctcatggatcaaggctgatattactgctaatttttgcttcatcccatgagaatatgcactgatcggttcccccaaagaatctgttagttcaaacatatccccatattttttgattctgtcagttcgttctgcctgactgaccccatatacatcagcaataaaattcaaatatttgattcctgttaaatattcatatagatcaggattatcaggaatataggccattaccttcttacatgctaacggctcctctttaattgatttattatcaatataaatattcccttgatcaaattccataattccagcaatcgactttaatgtagtcgttttaccagctccattatgtccaataaaaccataaatatgaccattttcaatctctaatgataaattatcgacggcttttttttgaccataagtttttgtcaaattttcaatttttaacattttaatctcctcatttcataaataaaattatttttattatttatattatcataatatcctacttatatcctaattgcaagtgatattgtaactatttagaatattatctaaatagattgtaacataatattaaactatttagaatattttctaaatagttattaaaaaaatatcctgctttaacaggatattcatttcattaataaaaattacttagatttaattattagttattttaggtttagtaccgcttttattaacatgccccttaataagagcatagactactgaaagaaccggaacactaaataacattcctgtaattccccataatcctccaccaaccgttactgcaaaaagtacccagatcgacggtaaacctactgaagagcctactactcgtggataaattaaatctccttccagttgttgtaacacaactaagaaaatgataaaaatcaatgcttgcattggatcaactgtcaaaatcataaatgcccctatgccaccaccgataaatgcccctacaattggaacaaaagccgtgatccctactaaagagcctaccattggagcataaggcagatttaacacagccattccaacggcacacaaagttcccaaaatgaaagcttcaactgtttgaccaatcacaaaatttgaaaaagttgttcgagcgagtgtccccacttctaacaattttactgaaatacgttttggaatataggcatcgatcaatttatgactttggcgttttaaagtttctttactcattaatatgtagagggcaaatacaattcccacaactaaattaagaatacttgtaaagaacattgaaatgacatcaacagttgaaccgagcattccagtaagtccaattttaaataagccacttaattcacttgcaatactgtttaaatcaacactattgatccatgtttctaactgcggaaaactattgccattttgattgatccacacttgtaactgttcaaatgtttctggaaaagatttaacgattacttttatcgcatttgttaattctggaataattaaagtaataattattccaattaccccaataacaatcaacaatgaaacaataatactgatcacacgtttaaaactagtatactttttatctaaaataaatctagataaaatcttttcgattctaatcattaatacatttaagataaaagcaatcataattcctaataaaaaaggcattattactgcaagaatactattaaaaatatctagtattatttgaaaattatttaaagcccaataacatccgataccaatcaatactatttctaatatttttttatagtcgattttcactccatccattttatcctcccgattactttagttaatcttattttaccactattgcttaaatatgaacaatcaacaaaatattgcataattacgagaaaatattgcaattatgaattctatagtttattataatgataatttaaagttattttaagggggaattaaatgatgaaagaaaaagttattcttgcttactctgggggactagacactactgctattattccttggttaaaagaaaattatgattatgaagtaatctgttgttgtattgatgttggtcaagctgaagaattaaacggattagaagaacgagctaaagcatgtggggcaactaaattatatattaaaaatgtagttgatgaatatgtcaaagattatatcatgccaacagttcaagctgatgctgtatttgaatataagtatttattaggaacagcaacagctagaccattgattgctaaaatattagttgatgttgcacgtcaagaaggagcaacagctatttgtcacggtgctaccggtaaaggtaacgatcaaattcgttttgaactcggtatcaaagctcttgcacctgatttaaagatcattgctgcatggcgtgatccaaaatggaatatggactctcgtgaatctgaaattgaatactgtcaagctcatggtatcaatctaccattctctgctgattcaagttattcacgtgatcgtaatatttggcatatttctcacgaaggattagaactggaaaatcctgaaaatgcaccaaattatgaccacttattagtgttatctacatcgcctgaaaaggcacctgaagaaccagagcatgtagttatcgaatgggaaaaaggattccctgttaaattaaatggtaaagcaaaatcattgactgcaatcttagaagaattgaatgaaattggcggaaaacacggaattggaatcattgatattgtagaaaaccgtgttgttggaatgaaatctcgtggagtttatgaaacaccaggaggaactattttaatggaagctcatcgccaattagaagaattagttttagatcgtgaaacattaaaatataaacggctagtttctgttgaatttgcagaattagtttatgctgctaaatggttctcacctttacgtgaagctttaagtgcttttgttgataaaactcaagaagttgttagtggtactactaaattcagattatataaggggaatattattaaagaaggaacaacttcaccttattcattatatgatgaagatattgcaagttttgctactggtgatctatatgatcatcatgatgctgaaggattcattactttatatggactttcaacaaaagtaagagcaatgaaattaaataataaagactaataaaagggctaatgcccttttattataacaggaggaaatgaaatgaatttatggggtggacgattcactaaaccaaccgatcagctagtttatgatttcaatgcatcaattagctttgatcaaactttttatacccaagatatccaaggaagtattgctcatgtcaaaatgctagcaaaacaagggattttaacaagtgctgaaggaactgaaattgaaactgctctaaatcaaatattagaagaccttaatactggtaaattaacgattgataatagtcaagaagatattcacagtttcgttgaatctactttaattgaacgaattggtaacactggtaaaaagttacatactggaagaagccgtaatgaccaagttgcactcgatatgcgtttatatacacgcgatcaagttgttatattaaatactttaattcataatctattaataacgattaatgatataatgaaaactcatattgaaacaatcatgcctggtttcacacatttacaaaaagctcaaccaattacattagcacaccatctcggagcttattttgaaatgtttaaacgtgatagcagccgattagaagatatttataaacgaatgaatatctgcccattaggttctggggctctagcaggtactacctacccattagatcgcgaatatactgctgaactattaggttttgatggaccttgcttaaatagtattgatggggtaagtgatcgtgattatttgattgaactattaagtgctatggctacaatgatgatgcatatgtcaagaatcagtgaagaaattattatttggaatactaatgaataccaattcgtcgatttagatgacacttattcaactggctcttcaattatgccacaaaaaaagaaccctgatatcgctgaattaattagaggaaaaacaggtcgagtatatggagctttaactagtttattaactacgatgaaaggtattcctcttgcttacaataaagacatgcaggaagataaagaacttgtctttgatgcactcacaacgactaaaggctgcttacaattattagacggaatgttaaaatcaacaacatttaataaagataaaatgcgtaaatctgctactggtggatttactaatgctactgatgcagcagactatttagtcaataaaggggtcccatttagagatgctcatggaattattgggcagctagtcctatatgcaattgatcaaaataaagatcttgatgacctaacaattgctgaatttaaagccatttcagaggtttttgatgatgatatttatgatgctatcaacgttgaaacttgcgttaataagcgtaatactatcggtgcacctggtataacggcaatgaaacaggttattgccttaaatgaaaaatatttagcacaatttaaatagtactagcagctgctagtactatttttttatccccctctttttaagtgatgtctcaaaaaattattatctcggggattatcaagactatcttttttttgcccactttttaaaattaatgtctaaatatttatttaatgctactggatctttagttcgatataattcaatcaatccatatcgatcatttagccttatctgctttttctgcaaataatcgaacatctttacaacttgactattgtttaatatttgaaaagaataaacatcatgatcagtacggacatctatatcaatataataatttaaaaacactcttagtaatgtaatttcatataaaacactacacattgaaatattgaaatcaataatttcattaataggaataactagattattatatttaatttcttcattattaaaaaataaggtatcacggtcgatccattgtttaagtgattcgttattaaaagaaattttcacctatctacgtttattttaattgtttatttttttcaatatcttctaattgaatttttgtattttcaataaactcttttttgtttttaaagcatctctaattgaaaattgattatttaagattaattttatttcatcaatcgatatttccatcgaccggagcaataaaatcaattctaaaatatcaagttcttttttaaataattatgataattattactattcctctgaggtgtaataaaaccctctttttcataataaataagtgtctgttttgctattcccaacatctcttcaatttcatgtgttgtcatactatcactcctttttcaattatattaaacactatattcttagtatacagtcaagaataattaaaataaaagaacagcattaatgctattctttataaccagtttaatttattttcaaattccactttatcttggccattttcaattacaccaatttcataacaaggatagtactctgaaagatgttccatgacttgccttttatcctgttgacttacaacaacattgaaaccaaccccacagttaaatgtatttagcatctccttatcatcaatattaccacgatgttttatatatttaaaaattggcaaaatattaatctttgctaaatcaattttagctgttaaaccatcgggaataactcgacataaatttccttcaattccaccaccagtgatatgtgccataccgtgaatcgataccttcgtaaacaatccttttaatgcttgataatatggtgtgtgtggtttcataatttgttcaataaatgtttcattcatgattcgttctaatttaatttgaggatatttatccattaacattctaactaaagaatagccatttgtatgaagaccatttgaagcaattgcaagtataacatccccagcactaattttggaaccatcaattaccttgtcctttgcaactattccagcaatacttgatgttaagacataaacaccatattcaacaacttgaggttgaattgatgtttctccacccactaatgagcattcattattttgacatgcttgcgaaattcctttcaccaatgaggcaatcgtttctttttcagcattaccacaaacaatcgtatctaataccgctaagggctttgctcccataacaacaatatcattaaccaaatgattaatcatatcatgacaaatcgattcactatatccatattccatcgctagtttttgttttgaacctggttcctccgatttaagaactaaaacgggatgtttaatatctgaaaatgaaatatcatataaagaagcaaacggtcctaacccatttaaaacccgtggatcactagtttttaaatattgtttcatttctctttttatggcatcactatatgcaatatctacccctgccttactatatgataatccctctagttctttttctacacctgctaataattcatcaacagtaatctctagtaatgcggccaaatctgataatatctcaacattaggcaaaccaccattttcccattttgaaacagcctggaaagaaacagatagtttattagccaattgttgttgagttaaacctttttctttacgttttaaagtaatgaattcacctactttatttacattgatcatatttataccacctttctctttaattataaacattaatattaaataaaaaaataatcttgcatttgagttatcccttataattcaactcttagttgaaacaaaatcttatcactatatcttactaatcaataaaaattattaaactaaaaacctaattcttacgattttcttaaatattggtgtttaaattgttttttaagacaaaataagctaagatgatttttgaggtgataatatggtttataatatcttagtcgttgatgatgaacaatctatcgctgacttagtggaattatatttacaaaatgaaagttatcaagtttttaaattttatcatggtcaagaagctttagacagcttgaaaaaaaatcattatgatctagcaattcttgatgtaatgatgcccgatttagacgggtttagtctattaaaaaaaattcgtgaagattattttttcccagttattatgcttactgctaaaaataatgacatggataaaattaacggtttgaccttaggcgctgatgattatttaactaaaccctttaatcctctagaattggcagctcgtgttaaaactcaattacgtcgttatacccgttataacactaacgaaccagcggttaatcaacaaatatacgattttaatggtttaatgatcaataatgataatcataagtgtacattatatgaccagccattaaatttgactccaattgaattttcaattctttggtatttatgttcaaaacgtggcagtgtcgttacatcagaagaactttttgaagcagtatggcaagaaaaatatttagataacaataataccgtaatggctcatgttgctagactgcgggaaaaaatgaatgagaatgcaagaaaacccaaatttgtaaaaactgtttggggcgttggttatactattgaataatactcattttaagcaaagtcttactgctaatctacttaaaaaaattggaatcacaattagtgtcacggtcgtaacttttgttattttattactttattcttatgaagtatatcaccagtatatttggcaagaatatgatcttgtctaccaggtagcacaaatcatcaaggataatttagtgactatttcaattactttgattgcttttgatactattattattttttggcttcgctaccgtgaatctttacagtatattgaaaaaatgcttgaagcgggaaaaactttagttgccgataataattatctgatcagtttaccatatgagttaaaagaaattgaagatcaaatgaatcaaattaaacgtgaatctttacaaaataaaaaagcgattaaacaagcagaacaacaaaggaatgatttattactatacttggcccatgatttaaagacaccactaacctcgatcgtaggatatttagacctactaatgaatcagcctaatctcacaatcgaggaaaaaagcaattataccaaaattgcctatgataaagctattcgtcttgaagaattaatcgaagaatttttttctattgctaaatataatcttagtgatatttctttagaacgaaaagctgttaatctttcaatgatgttagttcaaatctcttatgaatttatgcctttatatcatgaaaaaaatatcaactgtgttaccaagattgaagacaatctgtctcttgaattagatattaatcaatttgaacgagtctttgataatcttattcgtaatgctattaattatagtaaagaaaattcagatttaataatcactgccaaaaaagaagttgattgcatttttattcaggtagcaaactttgtcaaacatattagtgaacataatttagaacgtatttttcaaccttttgtccgcttagatgaagctcgtaatagcaaaacaggcggttcaggacttggccttgcaattactaaaaagattattgagctccatggtggtacaattgaagctgatttaactgatgatttaattacatttaccattaaactaccaatataaataggctttaatttcctaaaagtcaggaattaaagcttttaatttatataatctttctaataaaaaacaataaaggaaaatcctttattgtcttaatctaccttcctttaacaaacgaagaagttctaaattttgttttgcacttccagtataatcatatatcccattttttcttgctaactctcttcgagatgcgaatgaagcatctaccccgatttggaccaatgcatctacaaaagaatctcctcggtaggtcggattagataaatactgcatcattcccgttatactatcattattcacccagccgagtccatttccaatcaaatatggatttctcgctccctttacgactcttcgaatcgttccgtggtttatatatggaatcaatggtgtcgtgctgtcagaagaaacaaacacatgatcgaatgtaacatgatctcctacctgataattagtaatcggaggaattgtttcatcaccttcaaagttattaaatccacctgctattatttctgcaggaaaatctctataagcataatttcgatcaaccggtgcattaatcccctcaacaaatcctttatcagtatattgccacatatcaaaaccttcggcccctaattcttcagcataccgtgctacccactttgtatagcgatcaaataaaggtccagttaatttttccgtccaccaataatatgatgcataaaatcctggaaaatatctattgtttactagttcttcggcccatacacgactatttctttcaatctgttcattcgataattgtccaattcttggatcttctaaatctaaatatactgggtattccatcttatatccttcaaccaatcgcataacatgtcgtgcttcagacaatgcttcactttcagttgttgcataagaatacaaatataccccaaaaggaattcctaaccgtgtacactcatcagcatttcttttaaaagtaggatcgtcttgaccaggaatatcttgaccataaccacaccgtaagattgcaaaatcaatatgatttttaactaactcccaatcaatttgaccttgatattgtgaaacatcaataccttctctaaccatttattcaccccctcaaaatactatatgattttttttataaaatgactttaaattcaactctatttataattttatttttatattatatagccagcttctttttagaccattttctatatacttcgctgtaagaaatttgtaagattttctttagagtatctaaatatatgttctattgtcacttgatataataatcattgtagaataggttttttgattggggtgataaaaatggaaaagaaaaataactatttgatcaacatcacaatagctctttgttcaatatattatttttggatgctgatacgaataatcattttaaagaatggttttattgatatgggctataatagtaatctagtgttatttgatttcattaatcaatatcaccagtcagggctaacaaaagttctacttgtaaatattattggcaatgtttccctatttatccctttaagtattatcttgagacactattttagttttctaaataattacaacattgcctttattggtttttttactagtctatcttttgaactaattcaattaggcaccggatggggagtttttgatatcgatgacattttcctaaatactcttggctgtttaattggaataataatctatcattttattaatcagcatcgtcaaaataatgtttcgactagtttattcttacttagtttcgggagtatcggattaatttctgtttataactacgctccccttcttctcactacattcatcatttaaggagcaatattatggaaaaaaaattaaataaaaaagaaaaattctttattgtattggttttgggggtaattactatattttcaattgtaattaaatactattcaatgcatttatgaaacttaaaaaattaaaaaaaattcctgcttttatcgcttttatcattatatttatatttggttacttatgtctccaaataatccctcccctactatacaatgataattcaggtgcacttgataaggtagactgcccccaatacattaatgaatttgttgataaaaatcctcaagcaattgaactgaaagaaaattatcaacccaatgaaaacaccgatcctattatcttagatagtcctaatggcatccctttatatatccaatgggataagcgctgggcatatactacatatggtgatgaaattattggaactgccggttgtggccctacctgtctatcgatggttgctgttggcttaactggcaaaacaacttataacccacgctatgttgctaaatatgctattaagaacgattttcttgaaggcagtatgacaagatgggcattgatggaaagcggctgtaatgaatttggcttaatcgcttctgctgtgccattgagcaaaaatgaaatgtttaagcaattagatgctggtcatccaatcatcgccagtttacgtcctggcgattttacaacgactggtcactttattgtcattactaaaactattaatgacaagtttttagttaatgatcctaacagtaaagaaaatagtcataagcaatggtcatatagccaattagctcctcaaatcaaagctatgtgggcttataatacgatttaggactaccaaatggtagtcctttttttataattcccgtttttctttaactccgtattttaaatgatacagggcttctaaaacctcaaaaatataggttattgaaaatttaccaatcagtgaatgatgatctgttccaacctttaagatcatatcgatactatcactataaacaaattcatccaattgagaaataacaatcttataggccggactcttagaaattactcgcataacatctggatgatcagtcataaatcctcctgcaatacttgaaacaataattacatcattttcatctaatccttctaccgtcaaaatttgctgttctaaaggatacatcccactacattctttacccaaatatgatagttcaatctgtaattgcatcgatactgattgagtaaaaaagtttccagcaaaacaaaccttatttgcatcatgaattttatcgacaataaattccagatcttcataagatacactctcgtatgtttcttttaaattatctaaaatattatcaaaatgagctttaaacacttctttacctttatgtaaatactgcctttggggcaactgatgatcaaactgtaatctgagtgtatcgcgattaaaataatttaaattcatggtaatatccattttaaaatcagcaaatgattcataatttagttttctgcataatcgggaaatcgttgctgttgaaacaaaacaaagctctgctacatcagttattgtacttcccggaatcacatagatattttgaagaatttttcttgctgcattagcataaacatcatttatgctcgttgtattaataaaattaactaaattataaaaagctccgcgcattccctactcctccttattaacaataataattttgccatcatctaggcataaacaatttaactgtccaatcacaccacaagccaaaccaccatcaattccaattttattttgatggacatcatcaacccaaatatcaaaactccgatccttgtttaacatcgctgttggagtatgaccaaaaatataaatctttgtcaaatcacctcgtgcatgataaaaatcatctcgaatccataaaagagaatttaatttttgttcttttagtggataacgaacatcgattccagcatgaactaacacatatttttgttgatttacctcaatttctaaataattaggaagattaatcaaatattcatacagacttttaaaaaaagctgtccggataacacgataatcttcatatctaaatttatctttttgaagatattcacgaatatttctcatcgttgtatcaccaccattggctaaccataattttaacgcccgtgaaggataatcaaaatcatcataataaactccataatataaagcttcttgccacatgtattcatgatttccttttattaaaataatattattatgatcttgaatataaaataatatttttagactgtcaggtccacgatcacaaatatcaccaattatatataaaatatcattttcactaaatgatatcgtttctagtaattttatcaataagtcaaagtgaccatgtagatcactgatgacataagttttacccgtcattttatcacctaatcttatcatatcatactttagcattaaaatatcacttgatttatttgtaagcgctttactattttagaaaaaatttgtctttacctttatttttgattatacttatatttgtaaggaggggataattatggtcgacgaattctatttggacgttaatcttgaattgtttgtacaatggttatttggaaataaaaataagtatgatcataatatactatgtacattaaaaagcaatgaaccttacgggaaaactatcacttttaattattataatattagtggttcaattgttatttgggctaatggtatcattgaagaacaaatctttgatgatgaagaaaatttattattctatcttcattacaaactcgttagtttagctcaaggacaaaaattattttacgacttctacgattcattgaccaaacatacaaaatgtcccccacttaaaataattttatgttgctcaggcggtttatcatcatcattctttgcaaataagctagctgaactaatctccttaaaacaccttaattatgaaattattcctcttggcttctatcagttaaatagtagttatttggactgtgatgcaatttacctagcaccacaaatttcatacttagaaccacaggcaatgaatattgttaaaaataccgtgccagtacactgtgttacaccaagtgtttatgcaacatacaattatcgtgggttattagatatgattacaaatgaaaatatatctaaaaccaaagaaaacggaactatttagctccgtttttatttacctaaagtcgctaccataactgctttgatagtatgcattctattttctgcttcatcaaaaacaaccgaattagcacttctaaagacttcatcttcaacttcacgaatatcaataccttgttcgtatttttcttttgcaagagtagtttcaaaatcgtggaatgaaggtagacagtgcataaataaagttttatcattacctgttttagccatcattgcctgagttactttatatggtgataataatttcacccgttgtggatataattcttctgcttcacccattgaaacccaaatatcagtatagataacatcagcatctcttaccgcttcatcaacattatctgtcaccataaaacttccaccagatttttcggcctcagctttacaataggctactacttccggatccatttgtagttcactaggccctaatgcaacaaaatgcatccccattttagctgctccatacatcaaaccataacaaacattgttacgaatatcacccgtaaaaacaaacttcacttcgttaagcggcttatctaaatgctcttcaatcgttaaaaagtctgctaaagtctgagttggatgatctacatctgtcaatccattccatactggtattcctgaatattttgctaacgcttcaactgtactttgttcaaatcctctaaattcaattccatcatacattcttccaagtactttggcagtatcttcaattgattcttttttccccatttgtgaattacttaaaaaagtaacatgagccccttcatctaatgctgccacttcaaaagcacatcttgttctcgttgaagttttttcaaataacaaaacaatattcttacccgctaagctattactcgtttttccttcctttttatctttttttagctgatgagctaaatcaagaaaatatctaatctcttcttttgaaaaatctttaagtgttaaaaaatttctaccatacaaatccattataaatccccctttataattttattcttaattctaacaaaaataaaagcaataatcaactaattgattattgcaggttcactatcttctttttcaaacatttctttaatattatctttcgacttgattaccaactctctaatttgttttaatgtttcgtctgtcactaaaatatcaaaggcttcttgagctgaagttgcttctacagcaattgatagatctaagcgaaacaatttcttttcattatccatttcaaaacctcctttaatgttttaataaatattgatcatactgtaccataaatcttggatgagcttcgattttcatataaatactattttctaaatactgaaattctaacactaaacaatgctgatgtaaatacttaaatacttcaccatcttgataaggaatatttaaatcatagattgcataatctttaaaaaggatatcgctgattgacttttctaatacttctagtccaatacgttccttagcagaaataaatgcatatggctctaacggtacaataaagccatatttatttaaatcaactttgttatatgcataaatcatcggcgtatcctttatccctaattcttttaaaactgcattagtagtattaatatactgctcataattagggttggaagcatcaacaacatgaatcaacaaatcggcttcaactacttcttctaaagttgaacggaaagcttgaatcaaatgatgcggtaaacgctcaataaaaccaactgtatctgtcaataaacaggggtgctgattgatcgtaatatgccgtgtcgctgtttctaatgttgcaaatagcatatctttttgcaatacctgcttatttttatttagacaaaaagcattcattaaagtacttttgccgctattagtataaccgactaaagcaataaccttcatctcattgtcttttcgtctttttcgttgattttgacgctgtttaacaatattagctaattgctttttagcattaaagatttgatttgaaaccaaacgacgatctaattcaatttgtttttcaccgcttcctctgaatcccgaaccaccctgctggctgtataaatgttctttcatgcccgctagacgtggcaataaatattgacctttagctatttcaacttgcagttttgcttctttggttttcgctcgaacttcaaaaattcgtaaaattagatcagttcggtcagttacttcaatatctaaaatatctgttaaattttttacttgtagtggtgataattcttcgttaaaaatcactaggtcaagattatctaactgtcctttaatttcttgaacctttccagtaccaatatataatgaaggattaatcttatcaagattttgcacacatctttttatcacttcaatattacatgctttacataattcctctaattcaattaatgaattatctaaatcataattcatttctttatatctaacaccgactattaatgccttcatcatttcaccccactccattttaccttatctaatcttatattactagaaggaaagcatatgaaaaaattcaattactattttactttactattagttgcctttattacactattttcattctttaacatgtttcaaattgtttcactctctaataatgtgattaaaataattattaataatctattaccttcattattaccatttatgatccttatttcactctgtttatctttagggttattaaatctctttagctatttaatccaatggatctttaaaccattatttaaattatcaccaatcatgtcttctatatacttcatctcatttttttgtggttatccaactaatgttaaaatgatcaaagaagcatatgaattaaattatattaattctcaagaattacaacatcttttatctattgcttcatttgcttcaatttcctttatttttgtatcattgcatcttgaatatccattgatcatatatttttgtcatctagcacctagtattattaaagctttattttatcaccagcattatgagtttcaaagtttgaaggaatcaatcattagactaaaaaagccccatgtcagttttgtggaagctttgaaacaaagcattttaagttcatgttatgcttttattttcatccttggttatatgctggtttttcaattcgtaggatatgctattggtcatattattaaggacagcttcattaatgctattattcagggagttcttgagtttagttctggaagtcttcaactattacaatttagtcataccccgctagtatatagcttaatttgttttaatctatcttttagtggtcttagtgtaatgatgcaaacggataatcttttagatggaattgactatagttttaaggcttatttcaaagctcgcttatttcatggtctttgttcatttaccttatgtctattaattttaacttatctgttatgagcttatcatttttttaaccatcttattatttttaatgaaataattttttcatttattaaaaagaatcgtcctcgacaaatattttcagtataatagaaagatgtaaagaggagaatgattatggaaagcaaatttaaaataattattatggatgttgatggaacattaaccaacagtcaaaaaattgttaccccaaaaactaaagcagctttaatgaaagcacaagagttaggtattaaattaattttagcttctgggcgtccaacatctggccttattggattagggcatgaattacaaatggataaatatcatggtttattcgtatgttataatggtagtaaagttgttgactgccaaacaaaagaagaattatttaatcaaccattgagcattgaagaaggcaaagctgtcttagagcatatgaagaagttcgatcgtgtacgtccaatgattgacaaaggtgaatatatgtttgtcaacaatgtttatgataactatattaatttcaatggtgcaccattcaatgttattgaatatgaatcacgtggtggaaactataagttatgtgagattgacgatttagcagcttttgctgattttgagatcaataaaatcttaactactagtgatcctgaatatcttcaagaatactatcaagaaatgatggaaccatttaaagatagtctaagctgtatgtttaccggtcctttctactttgaatttacggctcaaggaattgataaagctaaagctttagatactgttttaaaaccaatgggttatagccaagatgaaatgattgcttttggtgatggtcataatgatgcatcaatggttaaatatgcaggaacaggtgttgctatggctaatgccgttcaagacttaaaagatattagtcaatatataactttatctaatgatgaagatggtattgctgaagcattatataaatacattccagaattaaaagattagtacgctgaagcgtacttttttcttttattaataataattatcaataagctattgacatatactaacaaaagatatactataatagtaaccattactattatagaaaaggaggtagcgtatgccaaagacaagatactctaaacagcgtgaattgatttacgaaaatttaaaagcaagatgcgatcatcctactgctgaagctatttatagtgatttaaaaaaagataaccccggcttaagtttaggaactgtttatcgtaatcttaactttttagctgatgctaaaatgatcagaaaattagatgttggtcaaacaatcgtccatttcgacggggacattagtgatcattatcattttatctgtaatgaatgtaatcaagtgtttgacatcacttaccatgatgaaaacattagtaatgtagtacaagaacatactaaacatcatatcgaaaaaacggatattgtttttagcggtatatgtgaagaatgtttaaaaaagaaaaattaaagaaaataacggaggaaactaactatgacacttaaaggaactaaaacagctaacaacttaatgcatgcatttgcgggagaaagccaagcacgtaatcgctatacttactatgcttcaatcgctaaaaaagaaggatttgtacaaattcaaaatattttcttagaaacagcaaatcaagaaaaagaacatgccaaaagattaatgaaattaatgaataaagatttagccggagaaacattatatactgatggaaacttcccagtattattaggaactactgctgaaaacttaaaagcagctgctgcaggagaaaacgaagaatatacagatatgtatccaagttttgctaaaacagctcgtgaagaaggatttgaagatattgctacagttttagacagcattgcaattgctgaaaaacatcatgaagaaagatatttaaaattattagcagctttagaagctggtaatacatttaaaagagaaacaccagttgtatggaaatgtaataactgtggatttattttcgaaggtttagaagcaccagaaagatgtccagcttgtgatcatcctcaagctcactttgaagtaaatactttctttttaggataattatttaaagcccttactagagggctttttattattaatattaaaaaactgctttgaatagtttcttttgtacagtctaactgctatctatataaatcaactattttagtgattaaaatataattgaaaactaaatttgatgatagcaattaattcttttatatttttcattcttgccacctcctacacttatataataatctattttaatagtacaaaccatcgaacttcatgacaatattcttacaattttgtaatatttaattttatgatataatgactagcgaggtgcgacaatgaaactaattatcttatggctcattaatacaatttttgttttacccttaaaaataattactatactttttaaactaatatataaaataattaaaaatatttactttaataatttagatttagaatatatcaatacaatggatggtcatgattttgagtatttcaccaaaacattattagaaaaaaacggctttaaacaagtgaatgtcagccaaagcagtagcgattacggaattgatgtctttgcatataaaaacaaatatacatatgctatacaatgtaaacgttacagcaaaacagtaggaatcaaagcagttcaggaagcaaaaagcggttgtgaatactatcagtgcgatattccagtagtcttcactaacaatacttttagcagtgctgcaattaatctcgctaaaaatacaaatgttgagttatgggatcaagatactctttatcactatttaaaaaaatctaagattttaactaaatcattaccactttattatcctctgtttaccttcattactaccgccattttatcttattactatttacagcatcaagactatttactgattcctttattgataaatatgtttttgtttatcagtatcattattaaaattttgaaagataaaaaaaagactcctattattttaaaagagcctgaatatacgattcatgattatcacgatactattcaatagtatcgtttattatttgcttttgcttatgataataataaaataaacataaccctgctagagtaattacaattataacaatcataataaaacaatgcataaaaaaggtttctggtaaaatattgattaccggatcactacgataatcaaatacccaataattgtttctaaatacaatttgatgaaaagttataaaagcactttcaaaatctaatgctacaacaaaacccaacattgctggtacaataatagtaatcagcccagtaagctttaaaaaacgatattctttttctttaaatcgtctaattactaacggtaatgagatcaacccactaactaccataattacctggattgcctcaaaaattgtttttacttcttcaaaatgaatcctaccgtttgttgacattacaaaatctggcagattcaacgttccccgataaaagatcgactgatatgcaattaaaacatcgtaattcttttttattgtttcaactgacattccactcgttaaatcaattcctaaataattaatatctaaataatacagctgtttaaaaaagacagtgaatactattgctaatgaaataataaataacattaacatcgttgctaaaaaaatgtcttttttattataactcatataagaaatcttcccctttttgaacttcaacttttgaaagatttggataactttgttgtcttaaaacctcgtaaatacaaatagcagcacaatttgatagattcaaacttctaactttatcactcatcgggattcttaaacaacgatctaaatgcatggttaaaatttctttaggtattccatcatgttcatgaccaaaaaataaataatgttcttttttatcatcgctaaagtcttgatcagtgtaacaaagatgtgaataacgcgtaaaaaaatgatattctccaggatttttttgttcaaactcttcatagttttcataaacatacaaatttagatctttaacataatctaatcccgcacgtttcatttttttatcatctaattcaaaactcattggtttaataatgtgtaaactagtgttagtagcgacacacgttctcataatattccctgtattttggggaatggctggatgaactaatacgatatgattcatttataatatctcctttaaaatcgtatataatttttttaaagctttagctcgatgtgagtatttatttttttcctccattgacatcattgccgaagtcatctgacatggcggaaaatagaaaattggatcgtatccaaacccattagctccttcaattttatcattgatcaagccttccatcgtttcttcaattaaaattggttcttgaccaggtataactaaagccagcgcacaaacaaagcgagcagtacgctctttatctttaagcgcatcaattatgtattgatttttaatattataactagtatctgcacctaaaaaacgtgctgaataaattcctggttgtttgtctaaagcatcaacttctagaccactatcgtcggctaagaccggcttgttaacaatatttgcaattgtttgagctttaatcagtgcattctctttaaatgttgttcctgtttcttcaatttccaattcttgctctaaaacatctttcatcgataatacttcaatatcaatatctttaagcattgctttaatttctttgatttttccttgattagttgaagcaacaattatttctttcattattttacctcgattcctagtactttttttacttcattaattggcatttcttgacctgtccatattttaaatgattcaactccttgataaagcagcatcaattcaccattcatcgttgcacaacccgcttcttttgctaatcgcagcatttttgtaactgcaggctgataaataatatcagctacttttaaatctggtttaaaataagaagcatctggtactactgatcgttctaacatcggttccataccaacaccagtagtattgataaaaagataactgctgtgcatatcttttttcaaactttctaaatcacttaaagattttaaggtaatcgtacaacctgtttcaataattgtattattgattatctcctgaaactctgtacgcatagttcggttataaacgattatttcttttaccccatctaaagcaagctgtaccataattgcagttgacgcaccgccggctccgaccatagttatctttttgtctttaatcaaccatccttgctcttcaagacttctagtaaagccaattccatcggtaatcgtaccataatattttccatctttaaaagtaattgtgttcactgcattacataatcttgaagctgttgatatttcatcaaggtacggaataatattttgtttatgaggcattgaaacattagctcctctaactttcatcgccttaaacccagcaatcgtatcttttaattcctcactctttatatcaaatgctaaataaacactatcaaggcctaattgttcaaaggctgtattatgcatcgctggtgatttagaatgatgtgcaggactagcgataaaagcatataaacttgttgttgcactaatttgtgatttcatgatctccctccattttttaaaagtattatagcatggatgacagaaagtttgcagtttttgaaaaaaatatatattatttttataatagcctataatggagatatagatacggaggactatgaaatgataaaaaaattaattgttaatgctgacgattttggtatgaccgaaggaaattcaattggtattttaatggcacatgctgatggaattcttacatcaactacatgtatgatgaatatgccatttgctaaatttgctttagatcaagctaaaaattatccagatttaggtgttgggatccacttagtcttaacagttgggagaccattagtagatggtgctaaaagttatactgataaagatggtaactttattcgtccaaaagactatccagatcatcaaccccatgctgatcctgaagaattatacacagagtggaaagctcaaatagagaaattcattgaaatagctggtaaaaaaccaactcatattgactctcaccaccatgttcatctattaccgcaacatcaagaagtggtaattaaattagcaagagaatatgatctaccgatcagacaacgggaccaaatcattgataattatgaatatgtacgttgtaatgatcaaatgtatgatgatttgatcacttatgattttatgtctaattcaatgaaagttgatgaagaaactttagaatatatgtgtcatcctgcatatgttgatcaacgtttatacgatatgactagttattgcttaccacgaatgaaagaattggcattattacgtagtgaagaaatgaaaaactttattaaggataataacattcaattaattaactatagtgatttaaaaaagatataaatggatttaaaaataaaaattaattattatataaaaggctgtaaaacagtcttttattttttatatagattaaaaggatctccattttggaaatcctcttttactaattaacaaaaaaagataaattattattcattttacaaatagtattgttgataataatgtactcttaataaatcacaaatagtcataatttgataattaaaattgattccatcaaattttcccggtacttgaattacataatcagaaatcttatattcatctaaagcatatgttttattttgagtaattaaaatagatgttgttaaatcaacccgtaattctttttttatttcaacaaatgaattcattgacctacctgttgcagacacaaaaatagtaacatcattttcatcaagctggatatctttatcaaaattatgatactgaattactggtttcccaaaactaactaagtcagtttgaaattctactgcaatagacatcggatataaagctcctattaaaacaacacgcttagctttaaagatagcttcacaaatagtcgagatatattcactcattacttcattcgaacaagatttttccatttcatcaatcagctgctcactattaaccccaagcattcgagcccgaatctgatctaaacgaatcatatgtgatctcaacagttcggctttaaatgtatcataatcatcaaaaccaagcaaagcacaaaaccttaaaatatcctctttactgatttgacttttttcactaacttcattgaaagataaatcctctaattctaagtaatgataaacaatgaatttacaaaaacgataatgtgaatcataaagcaatgtcccatttaaatacgttaatattctacttattaataaattcataaaatacctcccttgatttaattctactcttattaattttaaaattagagttttttctattcctgaatagccaattcactttttttaattacaaatacttcttgagtatttaaacataaacaatttagctgccctttatcaaatggtcctaaaccgccatcaatcccgatcttatctttaaaaaccggatcataccaaacatcaaaacagccacttgcctgatgaatataacaagttggcgtatgaccaaaaataataatcttattatccaaaccttttgacataaagaaatactcgcgcatccatgcacattcttcttcagtttgttcatataaccccttttcaggattgattcctgcatgaatcaatacataatcttgaccattacaattcagttcaataaatgaaggacaacggtcaatgtaatcaatcatcatcttataaaacgccgctttaattactttataatcacagtcattaaatgcttttttatgtaaatattcatggtagctgtgaaatgttttatttccaccattttgagcccacatccggccttgtgatgaagcagggtcatcaactttaaaagcatcacgcatcataatctcgtgatttcccttaattaaatgaatgttatcaaatttttgaatatataaataaatttttaagctatctggacctcgatcacaacaatcccctaaaatatatagaacatcatcatcagaaaaattaattttttccaacattttgataaaaatattgtagtggccatgaaggtcagaaagtacatatatatttttaggcattactatcaccctttcttatttaagtttatcattaaacaaacattttttaaacagatatgctaaaagtaatcagtaattttttgatttaataaggctttttcacaaaataaaaacagcaatttatttccttaaaattgctgcttaattactataatattgcaaatccgcaacattaaaaatattatactgatcaaaatatttattctctaaaggaatccagattttcttaaatttctcatacatcatctcaccattacgcattaaaatacgcttagcttgaatatcatcagatacgttcaaagcaatcgtgaaatcataaaacattccaaaatacggatgcatactgtaagttccctcaataacattaaagcgagaatatggaattaattctacatgaacttctaaagccatctttgaacaatcaaaacgctgatatttaacgctttcctgatgttgcaaaggaacaattactgtttctttaaaacgttcataatcaatatttccacccggttcatttaaacgagcagcagttcgttgaaaaggctgtaagaaaaaatcatccattttaaaaagatttgtttcaaaaattgccttaatcatttcaccaagggtcgacttccctgcaccacattttccatcaatagcaatatttaaacgatcggttgtttgcaataattgattaatttttaaaattacgggaaaatagctataaatctgtttattaataactcgataatgtggctgatatagttcccgatatgttgatgaatgactaataggaggataattaagtttctcgtaattttcgatttctaaacaaatttgcctataatcaaaactaattgtccctctttgacaagcactctttaattgctctaacttattaatgaaggaaataatactcccgttcattagtttagcagaatatacaaataattgatttaatgtaagcagttctaattcaccagcatttcctaagtaaacacgaaccaaatcattccctatgtcttcttcaataaaactattattttttaactgctttgcctcatcttttaaacgctttaaactagtctcaggatcatcaatcatatgtccaccaccaaattcattttgataaatcaatttaataatatcctgagccttcatttggggatatttctctagctgagttgtaacgagtgcactaatcattattatatttaattaaatgcgcattttctaatgccataattaatattggaatcacgatcagctgtaatatgattccaggaattgcattggtaaaagctccagctataaagattgcaaatccaaatggctgtcctgccattccatataatattgcactaataattccccagattactcttccaccaatcatcgctattcctaaagcaatataagtattgagcggctttttagctaaacgattataaaataaccctgttaaagctccataagcagctaattcaaaagccatagctaatgcagttggatacattggcggcattgtaaataacatacttctaagcaatggtaagataaagccaacaattaatcctaacggccacccgcaaacaaacccacaaatcaatactgggatatgcattggtaacaacatgttgccgatacttggtatctgcatcgtaaaaaacggtaaaacaattcctactgccaagaaaaaaccagctaaaacgatatttctaacacttaaatttttcatttttccctccttataaaacatgaaaaaagccataaaaatacctgtttttcaaaacagtctactaccttcatggcataatgttatcttcttgacaacgtctattcttgctttaatcatgtataaaaattttatcgataaaccacagttttgtcaacatcaataatcaagttcaatcgcttaggcaataatttttttttaaataaaagagttattgatgactgtcagtagaaattgtgtatgtatgcaccacaaaataatcttaaattaactattttcctatattcaggtaaaataaaggttaccaaaaatttaatcctttaattggactagcttcatcaaaataattaatttcctatcaatatcaagctagtattattgaagaagatgagcgttttatctctataggcacattttaaaagagcaattaactatactgatacttaaaaataatcatcaaaacatacaatttctaccaatcaattaacacctctatgttatcgtacttttatcaacaaagatgattatgatgttattcttagtattaataaagctgattgattaggtatttttgatattgatataatttattcccgaacaaaaatttaaaaccgtaataaatgcaaataaaaaaatctattaataatgaatcataaattcattatcatagatctttatttatttggcttaatcattagatatagtggtaatcctaacaaaactccaccaccaatcatattaccaaaagttacaacgatcatatgtatagcaatcaaaccaaagttagcaccacttcctaaagcccctatcgttaaagtgaaagaacccatattagcaatactatgttcgaatccaggtaaaacaaatgccataaccacaatcatcataataattgttttggccgtatcgtcctgcatcttcatccctacgtaagcacctacacaaacgataaagttacataaaactgctttgactaataattcaatgatatcaaaacttaattttgtatttgcacaactaacaacatattccgaaagcagttcatgattactaccactaataaaaaataaataacaaactagtgcaattcctacaaaattcccaaaataacaaactatccacatgggaattatctgacgaaacttcaatttcttaccataaacaggaatcattgttgtaaaacaatttcctgtaaataactctgatcctaaaattacaataattactaatccgattccaaatgaacctgctacagcaatttttgaagcaattaaattatctttaaatagcaatgttcctaatgttgttgataagatcgtcgctaatcctaaatataatcccgcaactactgaacgagcaaagaagcgcccaatatcatcacgacacatttcatatttttttatccctaaatctgataacatttcaaaactcatattgaaaccctccaaacctgtttcattataaaccattattcttccaagttcaacaaattacttgtctggtgctatgttgtaaaaaatatagctcttatactggattctagatattcttttccaaaaaatgaaaaagcgcttacttaaaaaatttcagtgataaaatcgaagcatcaaaaaatatttggagggtcatacatgttcaaaaagggaagttatatctactacgccttaggaaatgggatgttctatttttcatgggcaatgttttcttgtatcatttctgtctatcttgctggaataaactgctcggctactgaaatttcattaatcacttcggctgcggctttgtttgcaatggcgactcaaccaattacaggttttctagctgataaatttaaaagtccaaaactagtcgcaattataactggtgcattaacaattatttttggtttactatttgcttcaacaaagtcttttatctttttatttttattgaacggcttcactcaaggttgtttaaacggaattaccgccttaacagatcgtttagctactgcctcaccatatccatttggagcaatcagagtttggggatctattctttatgctattgctgctcaggtaagcggtattgtttatgactatatttcaccaactgcaaacttctatatttttgcagctggtctattgctcatgttgttttctttttatatgatgcacgatgctaaaccgcttatcgttggtaaagcagccaaagtaacaactaaagaagttttaaaacatttatggcacaacaaaccttttaaaatttttatgttaatctatattctttttcaaggcccaagttctgcccaaatggtttacctcccattagtaatcaaaggtttaggagggactactacgattgtaggaacgactctgttatttagtaccttatcagagatccctgctgtcttattttcagatcgttatatgaaaaagatttcatataaagctttaatgatatttgcctgtgttttatctatcattcgctttgtctggtattcaacttgtccagcaccatatttgattatgtctgttttcttttttcaaggtctaacaacaattgtttttattcttgttgctgtaagaattatattagatttagttgatgaacaatatgtcaatagtgcctatggtatttcatcgatgttagccaaaggcttttcagctttgatttttcaaatcattggaggtcgagttttagatattttcccaggaaataatggctataccattatgtatctaatttttgcttcttcaattacaattgctttgatcttatgttttaaattcaagtttactaaaaaagttgaataatctaatcatgaaatgcaataattattaatattataaatatggtggaaaattttgacaatcataaaaaagtagatgaacaaaatcgcaaaatcgttttacaattagaagctgccacttctttatatcaaatgcgcggcttccaattcaccgacgaacttgatttaaaaaatgaaaaggtcatggttttaaaaaagtaatctagtcaataattagattacttttttcagcttgtttagaaacatttatcagtgtacaatatagtcattggaggagatataatgaaagatggatacatccgtgtcgctgctggttcttttgaaactagtattgctaacgtaaaaaataatagtgaaaatatttgtaacttaattaatgaagcttatcataatgatgctagagttttagttctacccgagctttgtttaaccggatatacttgtgaagatcttttcaatcaagatcgcttattaaatgaggctaaacagcaactgcaaacaattatcactgcaacaaataataaagatttaatcaccattgtcggtttaccttatcaacatttaaatagtctttataatgtagctgcagtaattcatcaaggggcgctgcttgccttagtccctaaaacacatattcctaattatcaggaattttatgaagctcgtcgttttgaacaagccccaaaagaaaatacactgacaaactttaatggtcaaaagataccttttggaactcactatgtttttgcttcaacaactaattcagattttaaatttggagttgaaatttgtgaagatctttggttaccagatgccccaagtactaaactggctttaaatggtgctaatttaattttaaatccttctgccagcaatgaaattacaacaaaaagcgattatcgtcgtttactagtaagttctcaatcagctcgtttagtttgtggctatgtttattgtaatgccggtaatggcgaaagtaccacagatgttgtttttagtgggcatcacattattagtgaaaatggaacaatgatcaaagagagccgaggttttgacagtgaactgatctatggtgatctcgatttaaagaaattatcaagtgaacgtcgaaaaatgacaacttttaaatcatatcataattatgaaattatttattttgattcaacaaatatcgatttaaataccacatattattatgatccccacccatttgtccctagtaatcgagacttacgggctaaacgctgtaaagaggtatttgatatccaaacaagaggtttaatgcagcgcttaaaagccaccggaatcaaaaaagtcgttattggtatttcgggggggttagattctaccttagccttattagtatgtacgatggccttcaaaaaactaaattatgatacaaaggatattattgcaattacaatgccttgttttggaactacttcaaggactaaaaacaatgccttaggattaatggaagaattagctgtaacaagtattgaagttgatattacagaatctgtccgtattcaatttagagatattgaacaagatgaaaatattcatgatgttacttatgaaaatgttcaagcaagaacaagaacagaaattctcatgaataaagctaatcaagttggtggtcttgtgattggaactggagatttatcagaagttgctttaggctggtcaacatacaatggcgatcatatgtcaatgtatgcagtaaatgtctctgttcctaaaaccttagttcgttatttagttgattacgtagctagtttgtatcatggagaaaaattagaaacaatcttaaaagatatactagatacacctgtttcaccagagttattacctcaagaaaatgatcagatcgttcaaaaaactgaagatatcgtaggtccatatgagctgcatgatttctttatttatcatatggtccgttttggtgatgaaccacgtaaactatatcgtaaaactaaactagcttttaaagataaatacgacaaagaaactattaagaaatggctaactaaattttattggcgtttctttagccaacaatttaaacgtagctgtatcccagatggtcctaaagttggaagtgtctctctctctcctcgtggtgactggcgaatgccaagtgatgcaaacgtaagtaactggatcgatgaaatcgaaaaaatataacaaaaaggttttgtatttaaaatcaatacaaaaccttttttattaatacatttgatttggcatcattggagcctctggtgtttcagacttaatttctgcaacaccagcttcagttgtaataaataaagctgagatacttgcagcatttaataatgcactacgagtaactttagtcggatcaataattcctttatcaaacatatcaacccattcaccatttttggcatcaaatccttgatttttagctgcagatttttgcatatcaacaatatcttcgctgttatatccagcattttcagcaatttgacaaattggtgataataatgcttccatcacgatattaatacctttttgaacatcaacattatcatttttaagcactggttttaattctttataagcttcaactaatgctgctccaccaccaattacaataccttctgcaactgctgctttagtagcatttaaagcatcttcaatacgtaatttcttttcttttaattcactttcagtagtcgctccaactttaattgttgcaaccccatttgttaacttaccaaggcgttcttggaattgttttttatcataatcactagtactgctagcaactcttgtttttatttcttcaattcgtgcctttaactcaggattttcttcattaccactgatcatagtagtattatctttagtcacaataacttttttaatagtaccaagttcttctaattgaagttcttccaacttcatatttaagtctttattataaagttttgcacctgttaatgcagcaatatcttgcagcatttctttttgattatcaccaaaaccaggagccttagttgcaacaacattgaaagtaccacgtaatttatttaaaactaaagttgaaattacttcattttcataatcttcagcaatcaataataatggtttgtttgtctttaaaacttgttcaagtactggtaaaatttcttgtaaattattaattttatgattagttactaaaacatatggattttctaattcgacttgcattttttcacgatcagaaaccatgtatggcgaaacatatcctttatcatactgcattccttcactgatttctaattcattatcaaatccattactttcatcaacattaataatcccatcacgaccaaccttatccatcgcttcagcaattaaatctccaatttctttactaccagccgaaatcgttgcaacactagcaacatctccactagtttcaactttacgtgaattcttcaaaatagtttttgctacctctttgctcgcatattcaataccttcacgcattagaacaggattacatcctttatcaacggctttcatcccgctattgatcatattacgagcaagaatagttgctgttgttgttccatcaccagcaacatcattagtattattagctacttcatatactaattttgctcccatattttcaaatttatcttctaattcaatttctttagcaatactaaccccatcattagtaatcaatggtgaaccataacttttttctaacacaacatttcgccccttaggacctaacgtaatacatacagcgtctgcaagagtatttactccttttaacattgacttgcgggcgtcacttgaaaatctaacttcttttgccatttctaattacctcctaagcaatataagctaaaatatctttttcttcgatgacaatataatctacttcgtcaattttaatattagttcctgaatattctttgtaaacaactttactattttctttaatttcggatttacaatcaggacctaaagcaacaactgttgctacactgggaatcttttttgtttcggttgttaaaataattccgctagatgttttattttctacttcatcttttttcaaaataacattatcatgtaatggcttaatcattttaatcactcctttttagcactagccattcctaagtgctaaaattattatatccttttctagcactttgtcaatacaagtgctaattttttacaaaaaaagattcttcaaaaaagaagaacctagtcatataaccagttagctttataataatatacgcctaatacaagcgaactaaaaatccaagaaactggccagcctaaatttacaaaaacaatgttatggaaaatgttagttgttactgtaacccagattactctaaaaatacaccagcacccaattagaacaaacattggaatattggttcttccaacaccccgcaaaacaccacaaatacattgggatagagttaaaaataaatagcctggagcaatacataacatcatcgttcgtccatattcaattacttgggaatttgatgaaaaaattcttaataaatacggggttgtaaaaacaataatgattgtcagtgtcaaaatgatcccacagctgatcaaagttccaatacgtgcccctttttttattctttcatattcttgtgcacccttattttgtccaacaaaagttgttaatgccattgcaaaacttaaaaccggtaagatagcaaatccatcgattttagtatatgaacctgttccagccatcgcataagcaccaaacacattaatatttgactgcataataatatttgaaaaagaaactaccgcattttgcattgcactaggcattccaatcttagctgtcttttttaaaatatcgggataaaaatgaatctgctgcaattctagtttatacatttctttagatctcactaaaatataaattgataataatgcgctagtgatctgagcaatcgtagtagcaatcgccaccccagcaattcccatcttaaaaattacaacaaataccaaatctaaaataatatttacaatcgatgaaacaactaaaaaatataatggatatttagaatcaccaaccgctcttaagattccactaatcatgttataaataattaaaccaattactcctaaaaaataaatccgtaaataaataatgctctgcccaattacggatgaatcaactcttacccattttaagattattggggtgaaaatcactccgactattgttgtgataagacttgaaacaagcgctaaagccattgctgtatgaacaccttctttaactccctgacaatcttgagctccaaaataattagaaattaaaacaccggcacctaatgataaccccataaaaaaactaaccagcatatcaataattggtccactagaatttactgctgctaaagcttgatcaccaataaaattacctacaacgatactatcgactgtattatacagctgttgaaataaatttccaaccaataatggtattgcaaacacgatcagctgttttgcaatattgccatgtgtcattaaaccatttttcccttccactattttccctccaaatatctacagtatactccagtacactaatgattaaaatagctaactaaaaaactgatcaccaaatgatgatcagtttttaaccaataatacttttctattattttttataaaccatgatcggatcgttagccgctttaacctctttatttgttaagaactgctccggttgaaaatcaccaggattagttacaacaaccattgtaagagtatccatctcttttgatttcaaaaatgcttcatcgaattttattaatggatcacccggctctactttagcttcaacttctgttaaaacttcaaatccttccccttctaacgaaactgtatccatccccacatggatcaatatttctagaccatcctcactcaacagaccaactgcatgtccagaattaggcattaacattttaactgtccccttaaacggcgctacaactgtatctgtagtaggcttgatggcaattccttcccccatcattttttctgaaaagacaggatctggcacttcttcaattgaaagtgtcgtcccggttagtggtgctaatacttctactgatttactttttttcttaaacaaatttaacattcctgattcctcctagaatagtattcctaatctaattttaacaaataaaactaatccgtacaacataccaagcggaatcaatcccactaacatcgctttagtactattatttatagtgaatttttttattgcaaacattcctttaccatactcttggaaagtaccataaatgatgagaaaactacaaatcatattaaatgaactaacttgatagacaattaagatccataacggaattaataatccatcacgtttttttcgatctttaagatcttgacagatattgcgcattgcaagataacaaaacggcattgctagaacgagtaataattgtcccacaatcaaaggttcattaaacatcttttcaatatccccttgggccataaataaatacaagaatccaagaatcaagataggaatacccacaaatagatattttacaatatccaaggcactcattcctttaaaaaatttaaatattgattgtagttttccgtacaccattttcacttcctcctattattttaattctggccaatatcctttatttgcttcaattaaatcatctaaaatttcttttgctaccttagcacttggtactgtttttgataatgttaaagcttgccacattttttgataacttccttcgatccaagcttcaacacataatttttcaactgatacttgttgttccatcaaacctttttggaattgtggaatttctcccatttttaatggttcagcaccttcattaccaacgatacatggaatttcaaccattgctgttgggtcaaagttaattattgcaccatcgttaggaacaatcaacaacattctttcttttgtattaaaagcaattgcacaagctaaatcgacgatataagcagcatgtgtatccgtactaaatccacaatctttagcagtttgtttcgctacaatatcagcagctgccccaaatactcttttttctcgtccatccataacttcattagcacgtgtatattctttatttgaatgttcaactacataatctggatataaataatattttaaataagtatttggtaatgtatcaggatcaaccgcatatacatctttaactttagtataagtatcaatccaagattgatcgcgatgttgaaaatcttcagtatcaacagcataaccaaattgacgacaatgttctttaatttttggcattaaatcattaccttctttatcagtaattgatgtccaccagccaaagtgatttaaaccataatatcttacaatcatatctttacgtgattctaagcctaaaatagtagcaaaatttctttcaattccaattggcatatcacaaatattaataattttagaatttggtcgtaatcttctagttgcttcagctacgatagcagctggatttgaataattcaacatccaggcattaggagaatacttttccatataatccaaaatttctaaaacaccaccaattgaacgcattccatatgctaaaccaccaggtccacatgtttcttgaccaacaacaccatgttttaatgggattttttcatctagttcacgcattgcgtataaaccaacacgaatatgtgccatacaaaaatcaatatccgtaaatgccgtttctggatcagttgtccaagaaaaggcaacttctggatatctttctttcattaaaattcctaatgcttcagctaatttattttgtcgctctgcattattatcatataatttaatttgacgaattggaaaacgttcttgattttccataagcattagaacaattcctggggtgaaagtacttccaccgccagcaatacaaatagatgattgttttttcattcttcttctcccctttttataataacttttcaaattcttctcttacataaggtactgttaatccaacgataacctggaacgctttacctttagcaactaaaccatgagcaccagcctttttaaagactccaaccggttgtactaatgtttcatctttaactgatactcttaagcgagttgcacagtttgtaactgattctatattatctttaccacctaatgccgctaagaaagctgctgctttaccagcatcgccacctttaacttcaatatttccagttggatcattgcttgtatcctctttagaagctttatattcagcttttgaaaccaacttaacttcttcatcatcgtcttcacgaccaggtgttttaaaatcaaatttttcaatgataaatttaaatacaataaaccaaattcctgagaaaactagaccaattacaactgataataaatattgttgccaatgtgctgatccaagtggaatccagttcaaggccgcattagaaataattccacttccaaagtcaccactaattccaattaaatattgtgctgttgctaatgatgctgccaaaacagaatgcactgcaaacattaccggcgcaataaacaagaatgtaaattcaattggttctgtaatccctgcaaacattgctgttaaagtaaccggaatcattaatcctaatacttcttttttcttgttttcttttgctgttgcatagaatgccgcactaatacctagtggagcgaacattttagagaaaccatataatgcataaccaccagctgggaacaatgttcttaatgaagctgttgatttagcgatttctggcattgctgctacccaagcagttttgattccgccttcaattgcaactgaatcatacataaacggcatataaataaaatggtgtaatcctgttggaatcagaattctttctaagaaagtatacacccatacccctaaggcgccactgctaataataaatgtttgaacaccagcaattccatgttgaacttgtggccaaataaagaagaaaataactgctaatccaatcattacgggaaaaccaatcatcgccacaaacgaagaacctctaaatactcctaaccattcaggcagttttgtatcgaaataacggttatgcaaccatactgcaacaccagcaacaatcaatgcaccaaccattccagtatctaacgttttaatacttgctacactagcaagacctgtaccactaccagcttcaattgcgtaatcaattcctacaaatgaaccccaattgcttaatagtgctgctaatgcataattaaaagtacaatataaaacaaatgattccatacatgctctagcattttgttttttagctagaccaattggtaacgaaataacaaataataagttgacttgtctaaagattgtccatgctgcttcttttacaacataccatactttaaaccaagtagtgtccgatgctgcaatacttcccatgatgacatcactttggaatactgtacaaacaccgatgacaattcctgaaaaagcaaataacaagactggtgtaaacatcgccccaccaaatctttgaattttttgcatcatattctaaactctcctcacttttctaatgtataggtccctatatgcctatcttaacaataattaaaagcgcttacaatattttgaaggctgtttgtaccgatgttaagataatagcccattatcacattttaacgtgaaatttcacaaataaacaaataaaaaagaagcaagattataaaaatcttgcttaatgatcaattatgatttttctgcctaataaacccggataatcccctgaggcaatcttttctaggttatcctgatgagcaataaaccatttatttttcttctttaaaatctttttacgcttttctaaaatatcgccagttccttttaataataaacaaatagttataaagccttctttactaaccgctataggagtgtaatgtaaagtagcactataacattcaacgatcgtacctttcggaacatagaaaagttcacatttagaactattatatgtgtcatcttgcatatcccatatatgcccaactactaaaatataatcagtgactgcaataattgtttcacttccttgatgatattcaattccacttaattcaacattatcaccggcgacaatacctgcaattatttctaaataaccataaacacgatgtgacagctcaataatcgaagacaattgttctacttctaaaacgctaggaagataaaagttatcttgtttagctgcctgaacaaagtctatacaaaattcaattgcttcatcaatattattatcaataaccttaccataagttctaaaagcttcgtcagtaatacttttgattgtatattcaggatttaaagtttgaattatttctaatgacatcttacttacattgcctcacttcaatatctttgagcatatcaattctaacttgatgacgcccaccttcatactcaccagttaaccaggcatcaacaatcatttttgcaagttcaattcctactactcgtgcgccaaaagccagcatattagtattattatgctctcttgataatttggctgaatatggctcactacatgtcacacagcgaattccatttactttgttggcagccaaagaaattcctacgcctgttccgcagattacgatacctttatcaacctcaccatttacaactgcattagcgaccgcttcaccagaaactggataattaaatctttcactgctatcagtaccataattgattacttcatagccatattttgcttcaatatactctctgatcacatttttatattcaactgcaacatgatcatttccaattccaattttcattttctactcctctatctcaataataatatcattattacttttatttcctaaattacatttgatttgtgcatattgagcagtatttgtcactaccatcaagactgttggatcgtaaccagcttctctaattgcatcaaaatcaacctttagtaaaatatcgccacgtacaaccgtatcaccttgtttcttcattgagataaaatgtttaccgtttaattcaacagtatcaattccaacatgaatcaataattctacacctttatccgtcttaattccaaccgcatgttttgtaggaaaaaaacttacaatttgaccaccgattggggcagttatttgtttctctgatgctatgatgcctactccttttcccaatgcttcactattaaatacttgatcatttgtatctttgatatcaattacttttccagctactggtgcactaatacgatatggttcaacttctacttttttcttccatttattaaataatcccattattttcacctatttattaacacttgccattctaaaatatgtataaggtcgccctttaattgaaatactcaattggtgaatattctctggtgaagtacatcccgaaaagccaccatcaccaatagcatgaatatcagcaccagtttctttcatctttaacgcaatcaagcgtaccgtatctgggtcagccccttcaactgaactattcaaaaagctcattgccagagtgcctggtttataactatgaatgtattcaactagttcccgaatcatcgtgacactgatgcctgctctacttcctggggctggtaaatcaatacaatcagctcccgcatcaatcaattctttaattatctctttagcatctcgattagccagaggatctccgagcaccttttcgtttataccatcttcccattttccagcaaagacgaataattgatcaccatacttttccttgatccatttagtacaagcaattacgtcattaattgaagttccactaccaggattaccacccaaaacaataaaatcaactcccatgtcaacacatttttgaacatgttcaggtgtacaaagcattccttcacggcgatataaagcttttttaccaccgtcttcaaatcccgctttgggacaacctaaataaatcccaagtggccttttacaacgttgccttaaggtttggtaagataatccttgaagtcctttattattttccatattatctaaatccattgtattaagcataaccatatcagcaccaaaagcaaacatcacctcagaattagttattcctctaactaatccttcaccagcaaataataaatgctgtcccatgattacccgcccttctgatttaaaaattgattctttcaattccatcggtgtcattttttcaaaatcactgcctgaagcactaattagtctaattacatcgctcattttatagtcctctcaattctttaattatttcttgataactcttctctttaccaaataaagcactcgttcctaagataaaaccttctaccccaatacttgacagcatagcaatccgctccggcgaacatgccccatcaatcatcactttatagccaaattcttcttttttggcacaaaattgtttaaatttatcatcaacaaaatttaaatacttttgaccagcaaaacctggattaacactcattaccatcacataatcgacaagcgataatgtttcttttacactttcataagatgtcccaggatttactacgattccagcttgcgctccagcatctttgatcatttgcaaagttctagttatatgcacatcactttcaggatggacatatataatctttacccctaattgtgcaaatttttttacatatgccccaggatttactaccatcagatgaacatcacaaggtttatttgctgttttgcaaatatattcaatatcttgcagtcccattccaaaatttggaacaaaactcccatccattacatcaaggtgaaaaatatcaattccactttcctctaattttcttatttcattttcaagattaccaaaattagcacacatcattgatggacataatagttttttcatattttttctcccctaaatgtttcttaatcattactgcgatcgtatccaaatagataagtcaaaacagctgaagcgacaaatgcaaataccattgcaatacaaaatcctacaaatccttcaccaaaaaataatgggaatgataaaactccaactggtccccccgctaaagctgcagcattaacaaatccagcaatcccaccagaaactgctgcacatccaactgcaatatagaaaggctttttatatttcaaattgaccccgtaaatagccggttctgtaattgagaagaatccagttactgctgctgacattgcattttgtcgaatttgtgaattttttgattttaaagcaacacctaaagctgcacctgcttgtgcccagttacttggaccagtcacggcattgatagtatttcttccatacattgctaaatttatttgtccaagtggaacaattccccaatgtaaaccaaaaactactaatacctgccataatccacctaaaagaattccacaaatagttggatttaaattatagatccatgtatagccttcaccgataaatgattgtaaataacttgttactggaccaatgatcataaacattaatggcactgtaatcaataaagtaattaatggcgttaaaacatttcgagctactgcatgaatatatttagtacacaatttttctaattttgacatgaaatatattgttacaataattggaacaacagaagaaccataaccttgagctgggaataatacatcaaacccaaacattttcatccctgtttcaccttgaaccaatccttgaatcgttggactcactaaagccaaactaattgctactgcaatatatggattacatttaaattttttagctgacgtataagctaaataaattggtaaaaacgaatatactgcattatatacttcatttaaaacaatgtataaaccactttcagcagacattcctaaaatgctagtagcaaacatcaataaagccctaatcatcccggctccaatcaatgccggtaaaattggagtaaaaattcctgtaactaattcaattacttgatcaataaatttcccttttacctttaaatcatctttttccactacatcaatttcttttcctgaaatccctgtcaatgcttcgattgcatcaaaagcttgggcaacctcattaccgattataacctggaattgtcccccgctctctactacattaataactccctcaattttaacaacttcgtcttttgaagcttttccttgatcttttaatttaaatcttaaccgtgttgcacaatgagttaaagaagcaatatttgctttaccaccgatatgctcaataatttgagctgccatcttattaaaatccataaaccctttccttagccagaatgatctctattctactattttcctctcttatagtttagatgcaattttcttgcatttatttgcgtaaacgtttaacctaactggtaaaaaataacggcgccattactttacgtaaacgtttacctaaattaaaaataccatacaaataggtaaatgtcaacatttttacgtaaacgtttacgtaaaaattaataaaacctgctaatatttacattcatagcctattcatgtataatttatataatcttaacaagcaaggagataacatggataatcataaaaaaaaactatcaattaaagatattgctgcaatttctggagttagcattgcaactgtttccagagtattaaataataaaggcggatattcaaaagaaacagaagaaaaaattaatgctttagctaaatcatatggctatgtttctaatatgaatgccaaaagtcttagagaatcgaaatcacagacgattggtttaatcgttccagacatcagcaatgatttttttgcgactctagcattacatattgaaaattattcagcaaaacataactactctgtttttatttgtaatagtgcaaataatgttcaaaaagaaaaagattattttaaaagtttagcaagcaagtgtgtcgacggcattatttgtatcagtggtttaaataaattaacagaagacatcatttataatgacattcccattgtatgtatagatcgctatcctgaaaataataaaactattcctcgaatttctagtgatgatattcatgcagcttttttagccactgaacatttgatcaaaaaaggctgtagagatattgtttttatttctagtttcaccgctgattatgagaaaaaagagcgttatttaggatataaaaaagctttagatacttacggtattccacttgataaaaattatatcttacaaactcaaggaaaagaaccaagccaaattgaagctgaaatattaataacagactttttaaaaacacagcgcaggattgatggtatttttgcttctagtgatttagctgccttaggagccttgtatgcactaaaacgagcaaatcttaaagttcccgaacaagtcaaattaatcggatttgataatactttatattcacggttacctaccccctcaatttcaacaattgaaaggaatccaaagatgcttgctgaaaagggctgtgaagttctattgaatatgattcaaggaaaagacattggttcgatcgatacaattgttcctgttgtcttagtagaacgagagtcaagtaaataaaaacctccgcatcaatgatcaatcttttcaaaggagcaatgaaataattaagtttcatcagctctaaatacaagattgtaccactaagcgcaggttttttagttattcagcataattttgatttccttgttgaaataacttttttgttgatagttatggtaatttgcaaacaataattccgttaatgcaaaaaacattgttggtgaagtatatgctgtttcgaaaacaataggaaaatcaccaaaaaagatataaattggttcatcagccagcaaagataaactgttagcatttatcctagtaatcgagattgttttgcttcctactgtcttggccaccttagcaattctaattaccgattcactttctcccgtcaaagaaataataatcaataaatcatccgcagtgattgctcgtgctaacatattaatttcactatcaccattaactaatgtcataataattcctaatttcaaaaattggcgcgacaattcttttgccactgatctttgaatcgtcccactagaaactacaaaaatacgtttagcatgatcaatcatacgacaacaggtattgtaatcacgattttgtaattctctaatcattttagcgtgattttcaaataatgcataaatatttactgtcttgcctaatcctacatcggcaagggtctgttcattgcgcaagtaatattttagctctgcaaatccctctaacccaatttttttagaaaaacgtaatatcgttgtccttgaaacattacatttttttcctaaatcttcaattgtgatttttgtgcatacttcacgatgattattaatataattccatatatataaatcactttcattcaaatcatcaaaatgaagatttactaattcgtttaattgcatcttttcatccgtcctttattatttaagtataacaaaaaaattttttgcaataaatgataaaatagcgaagttaaaaacttcgctattactacaacaaaattcaaataaagagatatagtaagggagtgttattatttgaattcaggccaaaatgctttattagcttcaataaggtcatctagaatcactttagctaaatccgtatcaactactgtacgatttaatactaacgcctgtaataatttcaatttattacattctaagaatccatcaactgttaatttttcatatgcatattgattttctaataatcctttatagaaagtatctactggatccatagctagtggttcaacaccatttgccccaacccgacaagctacttctaccatcatctcactatctaaatttggaatacatcctctatttttagtaataattaagaaaatatcgtttgtattattagctattgatgttgctaaatcaacaatgtaagtagcatgaacaccgcgattaggatctaattcatatttagttccctttaaagcgcctagtttaattacttctttcatcatattataagtatctttttctttaccatccattacttcatttgcacgagtataattaggatctgattcttcaacaacatgacgaggatataaataatattttaaatatgtatttggtaaatattcaggaaaatccttgaccattgttgacataaaattataagtatctacccatgatttttcgcgaacatgttcatcttctgaaccttttttaaaaatttctccagccattagttgctcccgaacagaaggcattaaatctgctcccgtcttcttatcatataaatgagtaaaccatccaaaatggtttagtccaaaatatcgtggttcaaaatctttacgttgacatcctaataattttgcataagcatccataattgcaattggcatatcacaaatgtttaagatacgataatcatcagggaaaattcgttttgttgcttccgctacaattgctgctggatttgaataatttaaaatccatgcttctggagaatgtttacgaatttgtttaactaactcaataattgcagggacactgcgtaatccataggcaaaaccacctgccccacatgtttcctgaccaacacatccatgtgctaatgggattttttcatccttttcacgcattggcaaacgtcccgctctaatttgcattaaagcaaaatctacatctttaaaagcaacatcaggatcagtagtgtaaataaattcttccaattcaggataatattccctcattaaaatttcaccatattgtcccatgatttcttgccgttcagcttcattatcatatagaactactcgctttaaaggaaatacatcttttttacttgcaagcatggccattaaatctggatttcggtgactaccaccaccaacaattactacattatattttttcatctcaaataccttctttctatgactttactttagcacttgctttaaggtctcacaatactttcaaagctaatcgtgcaaagaccatatacttaggtattcttcacaaaaaagcgtgacttttcacaaaaaaagatctagcaatactagatcttaaagattaacaataaatacttttccattatatgtgattctaactgatttctccccatttgcaacagcatcactaacttcaaaaacaaaatgaatcatcccactttgacccggagtcaatacagtagtgctggcactagctaaattactacgatcatctttttcataaaatgaatttgctggatattcattactatctttatcaaccaatttagctactgcaatattagatgctgtgatgtcactttctgaaatattttttatcgaagtagtcaaaacaacaaaactatttccatcattttgaacttgataataagtatataaaccaaccggattagcaggctccagcttttttgtaatatttactgcttgtaaagcaatttcaccgcgaccatctaatacaatcgtatcatttaaattcttactttcataatttttagcaatatccgttaatttaaaactcatattcgcttctttaggattttcttcatcaacagtagtaagcttaaattctatattattttttaacaaacttggtttaacttcggcataaaaatgcactttattagtcccctcagcagctaaacttccaccttgactaattgtttttccatcttcacttaccattgctgttgaagcgacataatcagttttatcaataacaaatgttcccttcaacgtactagatagcttcatttcctttttttgtagattagtcatatacatagtcacatcaattaatacatttgttgacttagatggtttatagtatgtataaaaacttccaattacatcaggggtaatttgctgtggtctactaatcgtttcaattttatatgaaactaaatcatcaaacttattttcttttcccatttcaatttttgccggctcattctctttactcccaccactacacgcagtaagacctaaaaccatcaaaaatactaataaaattttactcaatcttttcattatatcgacttcctccctttaataccttaattgtactttattgaattgacttattcaaccgcatcattccatcaataaaaaaagcattgatatattcaatacttttttcaccccttaaatttaattatactataaattatataaaaataaataaaaacaacaacatttgaaagatgcttgaaaaatcatctttttaggtatatatttgaagtagataaaaggaagagttctaaaaaaacataataataaaaaattagaacaggagccttttaaagaaacgttaaaacaacatgataatataaggcaaagtaatagaagatgcgtagatgaaaagtgaaattaaaaagttgttgaaaacgtttcgaaaatcaaaagaattgtggctgagtaaaccacaattctttttttatttgaaatcttcttattaacattactaataataagtgttactattaaactaaacgtaagggggtgcaaacaatgatcaaagacgactttttagctctaactgctcaaaaatttatcaatacatatttcactagcagaaattttgatcaagtcaagaatatgtttgctccagaaggctcatggctaggggctagtaataatactatggcaaacaaccttaaacaatttgatcaatactttaaagaggggtgtaacgagagttatgttcctgaaattacctttcaagattgttatgttatctacaacgacgataatattggaatcgtttattgtaattatcatttacatatcgaaagcaaaggagccctttttgatatggatcaacgggtaacgattgttttaaaacaatttaatactacacttaaaattattcatgttcatgcctcgacccccaatgatgcaattagtcaagaagaattctataccaatgaaattgctaaactcggatataaagagttacaacaagctttaaagaaaaaaaatgaacaaattgaaatgattatcagaacaaccgccgggggaatgaaaggtagtcttgatgatgaattttatacttacttttatgttaatgaagagctctgtaaaatgcttggttatacttatgatgaattcatggaaatgagtcatggtactgctgttggcgcagtctatccacctgatttacctgctgctttagcagattgtaaacgatgttttgccatcggaccagaatacaaaacagaatatcggattcgaaaaaaagacggaagtttattatgggtaatggatagcggacgtaaagttacagatgaaaacggtcaagtagtaataaatagtatcattactgatatctctgaacttaaagaaatggtcaatcgtttaaaaattgatcaagaacgctatgaaattgtatctcagttatctgatgatattatttttgaatatgatgttgaaaataattcactagtataccaacagctacaagctgatactccagtcaaaaatatattgactaattttttgacagttgatttaaaaaatactcatttatatcatggtgatatcgaacgctttaaaaaggatttgaagataattttatcaaatcaagtttctaatgaattatataaattggaatatcgttttgcaatcgcaccacaaagttatacttggtaccgtctaacttttcgacggatatttgataatgataataaattaactaaagttgtcggcaaagttgttgatatttcctcagaattacgattaaaacaccagtcaataacagatcccctaaccggaacatataaccgtttatatattactagcgcgattcaagaatattgtcatatcttaaaaaataatctttcctatgcttgtatcttaattgacattgattattttaaaaaaatcaatgatacttatggtcatatcatcggtgatcgttttctaattgaaattgtaaaaataattaagtgtttctttcgagcaagtgatttaattggaagaattggtggtgatgaatttttaatctttatcaaagatatatatgataaagagatcgtccgcgaaaaggcagatgctttaattaaaaaaattcatgaatatgtcactgccaataactatcctaaagaaattagtatttctatgggaattcatatcgataatcgaccagagatatcttttactgaattatataataaagttgatattgctctatataatgctaaacacaatggacgagatcgttatgtctattaccatgaaggtatgacttatcctaaataattgttaaagaccatataaaatgaagcgcccctaaaagctcgacatagccaactaaaaggggttgcttcaagatttacatagtctttaattatcattattacttttgttttcttctcatattctaactcacttgaccttctttataagttaagcgttttagttttaatttgatcacaaaaatatttatcatgttcaacaaataatactgtcggtttaaatattagcaataattcctgaacctgcattcgcgtaaaaatatctaaataatttaatggttcatctaaaataaataaatgagcttcttggcataacactcccgctaacattacttttttcttttgacctttactataagtactaatctcctgagtaaatagttcgcgagaaaaatctaattttcttaaaatagctttaaacaaacttaaatcaatatcaagactatttgcataatcatccagctttccttttaaatgactatcatcttgacttagatacgctatttttagattatttccaatatttacctttccttgataattattactttctttcataataattttaattatacttgtcttccctgaaccattttttccagcaagattaagtcgatctccctgattaatatcaaaacttaaattttcaacaataatatgtttatcataactaatcgtaacatgattaaaataacatagttgctgttttgagtattcaagtggaaagatctttaatttttcgattgtttcaatattttttaataaatcacttttttcttcgattgctttactttgacgtcgttcaatatttttagagcgttgcatcattttagctgctttatgaccaacataacctttatctggttttaaaccagcaacctttacacttttagtagcttccactttatttgaccaatcttcattttgacgagctgcctttttcaaacgcccaatatctttttttaactgctcattcttttctatttccctcttatcattattcattttcaaatcataccaaagggaaaaattcccttttatcacttcgatactattacgatttatagctaagacatgatctatacaacgatctaaaaaatcacgatcatggcttaccaatataaaacttttctttcgtttcaaatatttacttagtaaaagtcgaccgtgataatccaaatgatttgttggttcatcaattaaaataaaatcatgaggcttgcaaaaaagaatggccaataatactttagtttgttgtccttttgataaggtagcgaaattttgttctaaaacctcattttccacatcaagtaatgataattctctttgtacttcccataattcaaattcaccaagaatattctcaacaatttttaaagtcctaatattttcattttcaatatgatacggaaaatagtcaaagatataattaggggtaatatagccccgatattcatatttagacatcaataattctaacaacgtagtcttccctttaccatttcgaccaatcaatccaagtttccaatttgtatcaatttgaaaactaacattatcaaataccttttcaatctgattatcatatttaaacgataaattctttacgtctaataaacccatttccattcctcctaacaatataaaaagctacaagaaaatatacactcgtagcttaaatagaatcttagaatcggatttagttaaaaggatatattttctcgcgcacaaaaacagtaactcaaagtatactgttattaaattttagcaagaaaatttatacatccttccacctcgtttctatataatcatatcaaatttatttgataatacaaggcttttattgatacttactatcaatcatatcaataaaacattctaaagcaccaatctcatcattaaaataatataaacttaagatatcttgttttgaataatgatttttaatgaatcgataaaaaacatcccgcttgtatggaggtaataaatttatatccaaatgctgctcatcaacaaatttttctacttgttccatcattaaatcatattcatcaatcaaacaatcctgcccataatttcgtgccatgtattcagcataacctaaaaatagttgtttaaacctttcaccatcaatatttttaatatattcctttaaacacatgaccaataattgtatatctttttctgacatcttatcaccaattaaattattaacaagaaaagcatcttttattatagatgcttaaataatcgattgtttttttatgacaagatttgtttttaaagaatctttacaaatcagttgtaaaccaattaaaatatactcacttaaattagttactttttttatcttaggaagatatttagccggaaccatctgtttcaatgtttcatctaaatcactagcacgctcaagattagtacaactaatagctacgatttcgggatttacgatcgcggttaaacaaattacaatcttactcaacaattcaatcgttccgtggggagactgaagcaatttcaattgatcatcttgactcaagggtaaatattgtatctcaccagcacaattagttttacctgttacaagttgaccgttaattactgttccaacaccaccatacccttcacctggttgaaataacagacagacattttcataatttttttctgctagataaaaaccaattactgctgtatttacatcattacccaatatgatcacttgactatatttattggttagtaatgaatataaatcaatatcattaaaatttgttaatccagttgaagtaactcgcccatcattaataatccctggcatacttattccaataacttttatattatcaaacttagctaaaacgatgttaataatatcataaatatcattaactttaacttcctttttgattacttcatcactaaaaactatttcatctgccagattataaacccgataaatcaagtgtacccgccggtattctttattaaccgaaatcgttagcatccgagaataatcgctattcaaagaataaacaacactctttcttcctcccgtcgattctaactcaccatcttttaatacttcattacttgccagcaattcctttaaaatatttgtaattgtagctaaacttagcccagtcgctaaagctaattgatttttagtacaagtttcttgctccataaaaatatccatgactttatcccgatttatttgtcgtagatttttagtattactgatattcataggttatttttcctccttgttttgataccaatcataaatgatttttaatgctcctgaataatcatttgttgcaaaaatgcgtgttggtatcgttactacctctttatctggcaaacgtcgcttagcttgtggcagcatataagcaacttgcggtgcaattaaaataatatcataatcattagcaatctcaaataagcgtgaatatcctgttgcaaaaatctcatatgatagattttccaattttgccagctcttgcattttacttgcaaataaagttgttgtcagaccaccgctacagcataataaaactcttatttgcggccgattagttgcttctaatgcacaattaatcatttctttaaacaactccactgcatgattaaaatgtgttaattgaaaatgaagataaaagattttttcctttgtttgacgatcatttaactcttcctcaaaaattcccttgccataataaattattttcccaattactatttcattactgatgatgatcgtattattatcattgtcatcaactttgatatttaaactataatgattgttttgcattaatatccattttaaataaatcgatgcattgattccctgcaagaactcatccattatgagcacctcccctaacttatgacaagtattgtcataagtattataatatattttgtatccgtttacaatcaatctattaagttaataaaacaggcactaattttgttaataaaactagcgcctctgaacaatactgctatttgcttaattcttcaatttgatggtttaaataattattacagttaaaaattctttaacaactatcattttttgctcatcttgtcattttaaaaaagttatatcacgttcaatatacttttgatgtcgtgcctgctgctctaaaaataaatgttctctggcagctgtaagtttaaaatatatctcttttttattattatcattttgatatgttgttattaaattattagaaactaattttttgataattttactaattccccacgagtcatttttaggtgttctgctatttttgtaatgttaggcccatcaagaattccaattgcatcaagacaatgaattactgaataaccataaccttgcaaactgctgctttgggttagctttgataatatatcttgtttttcgtatagttcagtaaataaatcgagaatcacttgcattttaatctaccttggcaactacccgacatggcaagcctgtcatttcactaaatttcatcggataagtatttatagtaaactcattttgcattaataaactttctagattatctaaattttcaacaacaaatgcattatgatcagcacaatattgatccatcggcgtatgttctttaccgcgacgaatcccagcacaatcaattccaataatactaactttcttatctaacaatttttcaatcagattatttgataattgagggtgggcttgaaaatattctttagtaccatatcctgccttttctaaaaatcctgtataaaaaatcacaaaatcaccagatctaattttttccaaatcaatcacttcaatttcatcaatacctcggacatcaaaaataactccatttctttctaaataagataatggaaactctttgttcatcacatcaaaatgagtgcctaaatgcccaaaattagctttactttcatttcctttagcatcctgagttagttttggagtaacttctaaagttaaatcaataaacatattcttcctccttatattgtttctttggaaacaattctacagcatatttacaacctttttgtcattcttgattagatcacgtttattcttaccatcaagtactaatctaaaaacaacaaacttacattctttcgtactacgattaatcaatgtatgaatactatctttaactaatattaaatcatttggctgaactctttgccgcattctcttatcattatctaaatagtggatttctatctctccttcaataattaagattacttcctcgatagcttgatgaaaatgccatacttgttcagtttgcggtggtaaactgtttaagtgaacttcatactcgtcaaacaaataataggcaacatgagttccatcttttttatttacgatgattgcatcatcaggctttttaattattagtcccattgttttatcatatacctttctttggttttaaatcctagtttttgatatagtgcgattgcatcttttgaagaattcaagcaaatcattccacatttaccttgtccttttgttaataagtcactaacaattctactagcaataccttgatgacgatatttttcatctacccatatatttgttaactgccccataattcctgaaggattttcatttgatggcattaaggaatataagtataatgttcctgaagcagccaataattcattatcaaatcctaataatgtaaaacaggtaccattgataatacctgttttgtagaaatcacgaatcttgttaattgtctgtggtaagatttcctgattagaaaacagtcttaaatcacgtatccttaactccactaaaaaatctaaatcatttatatcagcataacgaaaatttaacattattatcactcactttcactattattcattatatcatgaaagctttacttctgatattcctttaacaataatcttaattatcattttctttttctatttcttttatcttagcattatattttttagcttcatttcgattataaaaataaaaacccgtccaaatacttgtaaagataataattgccattaatataaaagtgataacatagccgatattgctaattggcatccatcccaatttatatgctattaataaatatccacccagcccaatcgtaaaatgaaaagctatttgttttcttaaacttaaactttcaattttataaacatatgaagtcgaaccacaacaaactccaactaccattgctcctactgcatgcatgacaaaattttccatcaaaggttctaaaaacgtgctgccaaccactgtataaccaattagatttattactaccaaaaacgtacatccccaagcaatcccaccaaaaaaataactcactaaatctttaaagcgcattctctacacccccaatctttctttaaacagttttcgataactacgggttatgatttcttcaagaccattcttcataactatttccatcgttccattaaaagatgcttcaacatgattaatacgcttaatattgatgattgcaaattttgatatacgtacaaaatcttttcctaattgttcttgtacttcatagagcggtttatttaaaacatagcgttcttttttcaaatcatataatgctaattctcgcccttcagtacgaatcagctcaatttttactggatcgattatatagatcttaccattgttttgagccgtaaaaatcatttcttcacactctttttccaaaattgtaatcgcagcttgaagcgatggtgtcagcttagctacatttatcactgcccaaggctcttgacaattaggatcaatctttaattcaactttcatgcttttcacacctttctttaatacatctattatatcataatcatttattagcttcgtgcattttacctttctatttggtaacttgaaagttaataactacacgataaacattaattctctgcatatctataccataaaaaaacagcaccataaagtgctgttctctattcttgagcattggagttatcaagatattggtcatcatattccataatatgattttcataatcaatttcatcttgatctttaatttctttatctctgcgtttcacttagcagctcacctcattactagtatgcgcattaaagcataattaaatccaacaaataagaacttaaggttgcaatcgtagaacccataattattatccccgtaataaccgttaaaattcctttaccactaaaattcatttctttgttttccataatctttccctccatcattagtatctatttattcatctttttatatcaatattttttaagtgtctttataagacacttttaatatacatccattccattattttgtcaacaaaaagtatcttttttcgacacttttgttaattaatgattgcacaactagttatttaatagtaaaattaagacacaaggagtgaatacaaatgaccggtgaacgaataaaaaaattacgtaaagaaaaaggcttaactcaagagcaattaggtaacttacttggggttaaaaaatcagccatcgcaaaatatgaaaacaatcgagttgagaatttaaaaaaggacacgattcaaaaactatctgaaatttttgatgttcctgcttcatactttttaggaattgacgagagcaatcaacctattattactgattcaattactattcctttatacagtgatattagttgtggaactggtctttttgttgatgacaatgttgatgaatatatatccttacctgaaacattactttcacccagtaaagaatatttttgtcaatatgccgatggtgacagcatgatcaatgaaaatatcaatcaaggtgatttaattgtatttgaaaaaagtaatcaaattagaaatggtgaggttggctgctttacaatcgatgataatgttgctacatgtaaaaaattctaccgtgatgataataatcactgcattatattacaaccagctaatcctgaatatacacccattgtaataaatcaagaaagtcaagccggctttagagtaataggtaaactaactttagttattaataaaaggtagtttaccttttttcgtgtaaaaaaaagcctagcaatactaggcaagatccaatacttctttaattttaattaagactccctgttcatcattggatctagttgtaccataagcaatctccttaattggcagaactgcattatccatggcataaccatatttcacttgctgtaataactcataatcattcatttgatccccaaaagccatacattcatcaggttctatttcatagattgcttgtaaaaaacgcattccaacacctttgttaatatcacgattatgaatatccatccacatatttcctgctgttacaaccttaactgcgactggtaaatgcggctccaatgcttgcaaatatttttctatctgttcttctggatcattaatagaaatcttcatgatttcatcatcgatatgatcgaatgaatcaacaaattgataattacaataatgtaatctcaccaatgattcaaaatgcttatcacggcttaagacataagcccctttccgaccacacatgatcataaataaattatcatatggggctaatgctgttttgatcaattcaacattatcgtgtgtaattgtattacaatacaattctgtcgctccctctgcgatgtaacaaccattttcagcaataaaatacatttgttcacttaatggtaaaaatttttgatataatcgataatactgattaccactagcaattacaaatttgattcccttttcctttagtttataaaatatatcaataaattccggatcaaaacgtttatctgaatccaaaaatgttccatccatatctgttgcaattaattttatcatcatagcctccttatcaggatgtagtatagcataatctctatttagataaaagaaaaaggtgccaaaatatagtgatcatttctagttgctcactcaacttttaaagttcactacaaatagcaccctcttatttaactacttcaccatcccaatcaatgattccaccaaaatcaataacattttcataaccaagtttaatcaatttgtttgcagcctgacgacttctacttccactgcgacaatatactaatatttcttgtgatttatctggtaactctgcaatttctttattagaaattaattcattgggaatacagatagcattttttatatgcccggtcttatattcatctactgttcttacatcaataatgataatattactttcttcatccataatcttttgagcttcactcgccgaaatcctttgataagcagtttcttggcgatgattacgatacactaataaaacaataataatgataactaaaataccaataattaattgcatctgtcttttattcactctcaatctctcttaacattcgctcagcatcatctgctgctttaacctttgtaaatgccttttctataataccttcttcattaattaaatatgtagttcgcactacacccataaccattcgaccatacatgtttttttctttccaaacatcataagcttgtaaaacatctaattctggattagctaataaaataaatggaagctgatatttttcttcaaattttttatgtgatacaaccgtatctttactaatcccaataattattgtgtctttttctttgaatcgaggatagttttgagcatatccacaagcttgtttagtgcagcctggcgtattatctttactataaaaatataaaattattttctttccaacaaaattactcaatgaaacactgtcaccattttgatctaataaggtaaaatctggagcaatacttcccacttctaacatcttttatttctctcctttatttttctctaataaatagcatacctatttttgataccaaatgcaaatattatgacttataaatattatacgattatatcaacattttatactatttatcatcagttatccgagcattctttcaccactgatttttaaacttcttaaaccactcatttttctttaataaaaagaaaaagtggaatcctccaccatttct

SEQ ID NO: 220 - DNA, 1076431 bp, Thomasclavelia ramosa
  source 1..1076431: mol_type = genomic DNA
cttctccttattctatgattaaattttttaaacctgtttgataaactaactgatgaaaatgttccatctgttctttatcaaacatcttcaattgtttatcaacttcatattccagatcaactaattcatattttgcaaaagctaatggattgtagttcaacaattcgtatttaacttctggataaatattaacaagaaaatttgcaatactttttatattatgatcagtcgccgtcattgtcggtatcaacggtgttctgattataactttgtttctatattcactttctaaaatatattcaatatgctgttttatcatttttgatgaaacgttagttaattccatgtgtctcttttcatcaaaaacttttaaatcaatatatattaaatcaagatatgggagtatttttttgattaattctaatgatccatacatagttgtttcaatcgcagtatgaattttctcttcttgacaagcttttaaaatctcatacaagaattctccttgcataagcggttcccctccagagaatgtcacaccaccatcatctctaaaaaacaccctatcttccttgattttttccattaattgttttatatcatacgcttcactatcataacgaatagcattacctggacaagcttttaccaaattatcaaaagttccttcatattgcaaattgaaatacggacgattattttcatatttaatttgattttttttagaaaactccacacatctttgacaatgaatacaactattttcaaaatatattagtcttctttgagatgataatccttctggattttgacaccatttgcaccttaatggacatcctttaaaaaaaactgttgttcttaatccatatccgtcatgaacagcaaatcttttgatatcaaatactaaagctttagatatcttcataagccgtcctttcaataatctcatcttgcagcttaccagccagttctacaaaataagctgtatatcctgcaacccgaatcgttaatgacctatgttgttccggatgaagcttcgcatccaacaaatcttcacgtcgtactacattgaattgaatatgtggaatttttaaatctacaaatgctcttaaaaagttttcaaatttcatcattcctgtttcagttttaaaaaactctggtaaaaatttcatatttaacaagcccccatttgttgtatacgaatccttcatacgtgataccgattttaaaactgcagttggtcctgccatatctcttccataaactggtgacattccaccatcagctaatggtgtcaaagcatttctaccatcaggtgatgcacctacattttcacccattggaacatgagcacttactgtatacattccggtatgatatagaccaccgcgataatttgtataatctttcattctttccctaaaataaccagcccatttagcccctaattcatcgacccattttacatcattgccatacttcggtactttatttaaaagcatcgtttggataatttcatatcctttaaaatctgcttgtaatgcttctaataattcatgtctggtaatcatcttttcatcatatacgagtaccttgattgctgcaagtgaatcagctaaatttgcaatttgtatcatctgaatccctgaaagattgtattttgccccaccacgtgtcacatctactcccttttccaaacaagaatcaatgaccgttgataaaaaagctgtcggcaagcaatcttgatgagctttttctacaacaatctcagctttcatcattttttctataaaataatcaatttgtttttgaaaagcattttccaaatcctcaaaactctcataggtttcaatacttccaagatccaaacctattggttcattagttaaaagacattttccatgattcatagttaattccagcgctttatttaaattgaacattgcggcatcagaccagcccaaattgtttccatgtgtcgttaattcaacacatccaacaattgcataatttcttgcatctttttcttcaatacctaaatctttaatcatactatttacaattgcctcatcattaaagaactgtggcatcccactacctttagcaactactttgattgcttcctgtattagttcatgtgaagaatttttatttaatcttactgataaattaggttgtggtaatcctagatggtattgtgcttttaataacagtagtgataactcattataaatatcgcatccattttcatcaattccaccaatcgctatattaaatccgattggaaaaccagcaaaatattttgcactgtgctgattcctcaaatacacaatttgattaaactttaaccacaaacactctaatatttctaatgcctcttgctttgatataattcctttttcaatatctttttgataataaggataaagatattgatccattcttccaggagaaaatgatgatgcattagactccatgtgtagaacaacaaataaaaaccaaagtgattgtacagcctcatgaaatgactgagcaggtcgactagcaagatttgcacaaatatctgcaaccctttgtaaagatttcttattatcatcttccagactttccaacattgtcaaaatataatcatgataacgcatcataaaatggcagacaccttctaaaacaataattgtacattcataaaattccttttgattttcatcacaattttttaacttttcataagcttttgtcatcaatccttttggtccaagctctagccaagtcttcgtatctggacaaatgtgtccttgagcatgatctttttgattaattttaacaactttagcaattgcattaatttcctcaccataattctcttttatgacatcttccaatgaacggtcttgccaatatggataaattatctccttaaattcttttacatcttccttttttattcggaatttatcttgtggtcttgttggtaaagtctcaaactctttgttaatccaagaacatccactttctggaaatactactccgtacctaacacctttagtgcgattcccaacaatcaattcttctttttctacgtcaatttctaattcttctaatgctgctttcaaagataacgctctttttttaggaattgataagctttcattttcttgataaatcctcgttataattcgtgcctgttcaattgaaacataacgtggttcatttaacattttttcctttaataaagtaattcttggagtttgttctaaattatccatagctaattctccttatctcattttttatcgttttttattgtttgtaattgaattataatacatatacaatatttttcaatatattttcaataaaaaataataaaaaagtggctttaaaccactttatcataaaatatctaatccatatttattaataagttcccgttgttgaagcgttaccgccttttcacaaataattcccgtaaaatcatctatatgagaaaaaacataattcccgtctaattttaattttgccgtttcagccaacatataactctttttactagaattaatcacttgctttttagttaatccatcatcgatatcataagttgtaatatttcctgaatgtaagtcaattccaaccacacctaaaaatgacaagtcaaatttataactctttatttggtctatagtaattgcacctaagaatccgtctttaggattattaaattctccaccaataaaaatcaatcttgctcgacattcacctctaaaaatattgatcaattcaatcatattagttacaaccgttacgttcatatcacgctgatagataagttttgccaactcaatattaattgttgaaattcctaaaaaaaccattgttcccggctcaattatttcaactgctttttgagcaataagcttcttttcaggtgaatttaaaccaattcgctcaccgacattaacacgatgaagattagttcgtatctgtgttgctccaccatgaattctctttaattttccatttttttctagtattgttaaatctttacgaatacaatcttcggttacattaaaatccttacttaaatctctaactcttacttgcccttctaaatctagtttagcaataatctgattatgccgttcttgttgtaacatcatgatcatcccttctttgttagtattatgccattatttaaaataaaatacaatgactataaaatttataaatatgcctaatacttttcagccccttttttaactatctttttatccactgtttagcttatacttaagtaattgaggtcaaagttattaataaaattattaaacgtaataaaatgataagtgtaaggagggattattattaaaacaattggctgtttagtaagtcgcaaacgaattttagttgaatttattattagtattttgggtctggatctactctatgccattttttcaaacacattcaaaaagcttaattttttatctacaaaatccagaattgtattcaccaaccattatttttatgatgattgcaataatcattgtcactgctggttacggaaatcgacaaattattgtcattgataaaaaatattttaaatattgcagtaatcaaaatttatggtttaattaccaacaattttaccgcattatttttaactgggaaccaacatttgacattcaaataccgctagttaatattgcaaagattgccctatcatacagtgatatttatatactatgcaatcaaatttattgaggctcaaggcgttaaaatccaggattcctatcacttaaaagaagctttagctaataaagacatgcgttttgctgaatatattgaaaaaacaagtaatcatttttaaagaaattacatctattcatgacctgaaaaaaatttttctccacccaaaatggataaccactcaattatatttatcattgataatcaagaattagtgttcctttcattaagttaccatcctttatgctttattggaaaaaaatgatttagaaacagagcttaatcacgctatttctttgttattaaacctgcataaaaatattgaacaaattttaacttttaaaattgggtattcttatattcaaataaaaatcaatcaaataatttggattgaatcattagttactatttaattatccacactcagcttggtcaatataaatttcgaaaaaacttagtcaattactcgatgaattagctgttaatcaatttattcaagttcacaagagctatattgttaatcaaaaccacattgttattcgaaaaagtaatgaaatagttttaaaaaataaaatagctattccgattggtcggaaatttaaaaatactaattaaaataaaaaagagaaatagaaatgcctatttagcataatttctctttttcgttataactacttttgtttatttacttctcttcttttcatttctaaaattccaataatcactaacaatgaagctgccataaaaatcattggtaacattgatgaagtgtcatcaccagttttaacaatagaattatttaatacatctggatctttatttacttctgcttgtgtatagtccttagcgactaatgtatagattgaaaaacgatcagtctcaaaagtaataatattttcatttgctaagctagattttaagccattagcttcattatcgtgcagtctaactattccaaattgacggtttttcttaataaattcactaggaattgtcatagataatttgattggagacgccatttcactaatttctacaccatttatttctgggatgatcacgtcatcttttgaataagctgtagccgtaatagaaatatcgtaataagctaatattttcgctccatcctctaaaactttttcaatcttatctttctgatctatcgttatgtcactttctgttagatttttcaatgaaagttgagctttaataacagttccctcaggtaaatttcctaaaatttctgcatagtgtttatttaaataactcatcacgcttgtttgaactactttttgcgattcttcagcaagctctaatttactcccacctaagtgctcaaccacagtttctacagttattttatcagcaggatcttgtccattatctcctgagtcaccaccagacacacttgataatattactgctggacaatcgaattctatactattttcagctttatcatttacatatacatatgtaatttttgctggtgtaaattctatttcaaaatctttattactatcaattctaattgttcctaaagtaatctcttgctgttcaaataacttagttttattcgataataacaaatcaattttattttcggaaagattataatcatatattgaagctagtttctttaatccttcgtccaacataaatgcattttgatattcttgaattgattttgacgtattaatagataaatgcatcgttgcaatttgacgttcaaacatttcttgacttaaatgtagttttactgtcaactcatcgccagcttgattaggtgtcaaaataatatgtggcttatctgttgtaatttcgtgttcattatcattaatagcataaatattagttgataaagataaacacattactacagctataaaaaattgaaatatttttttcattatttaccacctctcttttgatttccgattgtgattgaaggtaattcagttggaattttcacttcaaaagaatcacttactaaacgttgaccagcatttgtttgagcatcgttaacgcgatacaactctggtttaattgagccaggaagttcaactttaacaaaatttccttcatcatcttgatatccaaagctattttctatgatttttccattttcatcagtttcaggaattaaataataaatccaagttccttcactaacatcagctagatccccatctccaggatcttctgcaaaaatagcttgatagccacttaaaatttcatctttattatatcttaattccacaacattataagctggatttccagcatatgttcctgtaaagatcaatgatccctttggaattgtattatttgcatctagtttataatcaccgcttaatataccaatactattttcttgcgacatatcaatattatcacctgttggtcctaagacatcaatttccgataaactaatatcattttcatcaacagcaacaatcttaatataactacttgaatatgaaaccaatgatttattattttctaattcatcattaacaatctggctaaaatataatttattttcttcacctgtttttaatgagtcttcttttactaaagtccagttgtccttatcatcacttacataaatctgtacttgattaaatgatgggttggttaatttaaccccggttatgtcagccaaagtatttagtgaaacaataaattcaccttgttttgtatctgtactccctttataaacattttgataattgttatcaattaaatcgtttactgctttttgttctggtaaacatggtgttgaatcttcatcaccaactgcttcatcattatctgaaataagattagtttcaatcagccattgatttttatcaagacttccatcatgagaaattttgattggttttaaagtcaactctgcagttcgatttaataatttatcatatccaatgattgaataagtaaaaacacgattattaacagttgaaacagtatctgtaaatgttgtttcaccagtttctgcatttacaaatccaactgcttgaccgtttcttaaaatttcataacctaacattgctccatcaactttatttgtgttagaaatagttaatgttacttgattactatttttgtcatttgataatgatgcattaatttcagtgtctacagacattctagctttaccatctaaacgataagccattgaatcgtcatctaaatattgtattttatctgtttctgcttcaaattggctaataaatgctttagtttcttcatttggaataattccccatgctgtaaagaaatctgttaaatctttgttagctgctgctgaagctaaacgtacaaagttttgttgagcatcactgtttaattttaatgcagtaccaccttcaggaatattcaccttcccaggattacgagcataataatctactcgagcaaagaacaatgaatttaattgttcctcgtgtgaatcatataatttataatgataattttgatcataagctaaatgtaattgccaatacattgccaattgtgtaaagacattacttgacattccaaccgtatttgaagttactttttcataaacatctggatatttaaatcttgttgtatcattagaatcacgattttgtgataataatgagaaatagttattagttatttctgcaattgcataacttccttgattaatgttatgtccaatttcatgggcaattccccaaccaaataaagaacccgataaatattttccattttctgctgcttcaaatggaattccatttgataaaccagatactgaaccccattcaattccgatatgatttccaccagcgtacataaaagcaccagcaaacattctttgataacggatatttaaatgctgagcaggatagcgatcattaatagcagctgcattttcattaagccccttattttgatagaataattccatcatttgatccattgcatttaatgaatttaataattgatttgccttttcatctaatgttgtaccttttaaaccagccatgatttgtttacctgatactgagtacagcatatgatcaagcataatctcagtagctcctaaaatacaatttttctcgtcataatcatagttaacactattgtcatcacgatgaagttcttcgtgttttgaagccattttattaatttgtgtttgtaaactttgaagataagtttttactttttctaatcgttcattttcatcactaacttgatataaatctaatgtagcaatcttttcaccacctgatactctaacagcaatcttttcattagaattaccagtatattgaacatacacagatccacctttttcaactccgatagactgtaattctttcatactgatttcatttttaccaacttttaagctaattggactactaacaaacgaagctgattcagcatgatattgcgaatatacaagttgtaaattcacagcttgtccattacgttttccttcttgacctacataaacgataaatgtatcactaggatatgtaacatatcctaacggttgccaagagtttaatcctccaaatccaaggtttccttgtttacttgctgcaattccattatgaatctcttgaatattttgtagtgcagttccctcaacaacttgtcttgcttgattaagctctaactgaattaaatctttaaatggatgtaattcttgggatacctcgtcaggtgtattcaatctagtttgtaaatcatcaagcgttgtagaagtaacatcatctcttacagttaaatggaatgaatctgtaaataaagcattgacatcttcttctaatgaatcatagtaataaaaattaaactctgaaatacgcattgttcgatttgaactttgtactccaaatctaactttattagtttttattggtttcgcaagatgagcgataaaataaattcttccgttatcatctgtttttcttctgaaagcatcgatcgaagcatctacttctttaccactttcatcataatatgaaattccaatattattaatactactatcattaactggtccagcaaatgaaatatagttcatttcataggtatcatcaaattcaaacgtcaaacgccaattacggtgataactaactccaaaatcccagtcattgatttgtagataagaatcatagttatcatctactaaagctaaagcgctattagttgtcgtactcacttcatctaacgggctatttacgatttctgtaactccattatttccgtagtaaacattattgatatgatttgataatttcccttcaccatttgaagtattaagcaatttatattgtggtaattgagcaggtaaaatattaaccgtcgttgcttcacttactaaagaagctggccctgtaccttttttattattaccagtaacatatacttcatatttagtattatcctttaaagaagtgattgtatatgaggttccttcgtatttacttacagcctcaatatactcgccattccccttttcacgataaaaaacattgtaagaatctgtactcttcatatctttccaagatacattaatcgagcgataagcaccaactgcttttacattatcaggtgcatcaggaacttttgaagcttgtggtgtagcctcaactgcagctgaataatctgattcccaaagtgaatttttatcagcatcattaatcgctttaacactaattttatatgttttaccatttaatagatctttatcgttaaatgattttaaattaaatgaattgacattagaggcatgctcctcagtcttaccattataggttatttttactttataacctgtaacgttatttaatgcatcccacttaatatagagttcttcatctaactcatcaactgtaattcctgtcggaatatctaattttggagcaggaatatgatcttccatcccatttaaaaactctactttagaaatttctgctaatgatttagaagatgttcctgttactttaatcgtaactttttttactgcaatttgagttcctaaatcaattacaattgatccatcagcttgaacgattgcttgtcgtgaagccatgcgagcacgtgatttagctgtactaataactgcttctatctcttctccattctcagcgacaacaattacactaccttctgttattgcattttctttagtgccttgaatcgtcaactgtgtaactgctactggctttttaacttcaagactcatttgaatcggattactttgtgaaatttcttcatctttttccggctttaacttaagcgtttcttcttgagctgtctcactaaaaatattttctatttttccctctaaagttccttgtaactcatcattatttactgagacattgtttactaacaatggctgagtttcaataactggttccaatcttgtaacttgagtagttccattatcactataagcatatgtaaaagtgtgtaaatctaataaatcaattttattattatcatcaatatctaataaagaattagaactatcattattaaaaatggcagtagataatatttttttatctttgctatcaattttaccatccttattaaaatcaccatatgcaaatgtaccaaatccattgccttcaatattatcagcaactgagtttgtattgacatactttacagtagtttcattgttattaacaacaacctctttactaacagtttcataaccatcaccttgaattgtcaaagtatatgttccattaacaatattcttaaattcaaagatttgactattttctttagtcgaatctaattctccagtgtaagtttgttcaatattagctaattgtgctgacaaagtactaatattctttttaaaatactgcgtattaataatcagttttactttacccgttattgaagaattcttaacatcagctgttttttctggcgacgttgattcattattaactgttttttcattagttatcattgaagaatcgttttcattttttgttgattcaccatttgtaactgatgtagttatttcttgcccctgactttcattatcagcataaatagttaactgtgttgaccccagcaaaacaactacgacaagaaaaaaagcaagtattttcttcattgtaattctcctttcctatttgttatttttgtccatttaatgggcttaactcgcattgcaaatcaatgttacgttatttatttttactgtgctgtttctattttatgcgcacaaaaaaaatgcacacataaaaatagcgtacacatacacgaatgaatgcaactggctgccatatcataattgatgaaggccctatagctttgcgtacttcttttttcaaagagtttgccatatttatgaacgccatgattatacaatgactatgtgataatgtcaaaaagtttgcttaaaaaatgtattataaaaaaaacaattttattttcactaaaaaaacctccaaaaccaaaataatcacctttatatcatgttatttttattccaactcctctactattttaaaatcatatttttacatatattaaaaatcaactcataaaaggtgttttatcctttgagttattgaactaataacaactttttgaaaataaatacaatttcccaggtaataaatttcgatatttattttatataacaaaaaaatgactagttaaataagctggtcatcttttcgttatattatttattacagttaatcaccgattaaaagactaatttctttattttcccaataatattatcaacttaagaccagatcttttaaacaatttatcaattagaattgaagcctcaaaggcagtcccggatgtcctgaatttgccttttcaacagtatcagcgcataatactctaatggtactgactgtttttctatcaactgcttccatattagcctccaaatactgctcgatagtctttttggaatttttcaatcccctcagcagtcaaaggatgtttcagcatttgttcaataacactgtaaggaacagttgccagatccgctccggctttagcacattcgataacatgacaggcgtttctgacactggctgagatgatctgcgctttgatatcatgcgttttgaatattgcggcaatatctctgatcagctgcagtccgtccatcgagatatcatcgattcttccaacaaatggagaaacataggttgctccggctctggctgccaggattgcctgcggaacattaaaaatcaatgtcagatttgttttgatcccttcaccagacagtacccggcatgccttcaagccctcagcagtagttggaagcttaacaaccatattcttatggatttttgcaatttcccggccttctttgatcatgccttcagcatcaacagttgtggctttgacttctccgctgataggaccgtcaacaattgcagcaatctccttaattacctcattaaagtctcgaccttctttagcaataatagagggattggtagtaacaccgcaaataacccccatatcatttgctttttttatttcttcgacattagccgtatctaaaaaaaatctcatataattctccttttatctagattaaaaagtttggaaaaactatcaaattacaataatttatagaaaatttatcagggaggataaagtcgactatttgcagtaattatttaattttccaaactttctagattgttattttaaattgttttttaaatcttttataattttttcagcgtttagattcttgtaatcctctgcacctatttttaatactaatttatcgggaaacatctgttgtatctttgcatagttaaatcttacttgtgggcttaataataaaatttctgcttgaataccttgagtcgctacttccgcaacaggacaggcaataacttgatactcttcattgacttctctaattaaatcatctaatttttttgtcaataatgatgttgttattcctgcagcacataacaatagaatacgtttcattattttaaatccaccacatacaaagcatcatgttcaaaaatatgcattccaaccatgcatccaccttgacaagaactaactgtccccacttctcgatgacgtgtttccaaatcaataattgtaatcttgtcaattgctgtagtttcaagttttaatttaatttttgtattttccggaacataaatcaataatagcttgttattagttaaagccgcacgaatatcatcaattccattcattaataaattttgagctgatgataattcagtaatttcataattatcaaaaataactttaatatcactataatcccaagcacctggataatgaatagcaagatgccatggattcggggaatcaaatccttctcctacttcgtttgcaaattctttaccataagtatgccaactgtaaatgccagctgccccatatgtgattcccgcaaaagcaccggttaaaatactttgccaagcagctcgtctgatttcaaattgatgaaaccgaccatacatatttgaggaataccccatttgttcataacacggttctgaattcaataacggcttaactggataatgttcaataaaatattctggtaaacaataaggcatcgctctattttccagctttgcattatgcccggattgaaacatataaaagtccattcgtttaattagtttctcaggaatttccatcaaacgtccacgtacgtgtagactttgtaaacaattcggtgctaattcatgtagtaattgacttgctttcaaataataagagcagctaatttcctcatttaaatcagtatccccgctgattacatataatggatccaaatcagtaaatgtctcatttactttttttatgtatccatcgatctcttcgtaaggcatcgtattatggctcaacatattatttgcccatgtcgctggtacataattacaccataaaacaactagtgctaattcaaaaccatattcttttgcaacttcacacatactacgagcatgattaaaatatgaatcattcaatttatcaaattgataattacctttttcatctttttgatacggtgaatgatttaaatcagtagcactagcatcccactgcggcaaaatattaatttgtagaacattatatccttgtcgcttacgatactgtaaataatatttccaatcattttcattaatatttgtaaatgcactccaacaagtatctgctaaatagaaaaatggtttaccattcttttcaaaactttttttatttattgctactttcaatcccattacttttccccccttactaatgcttttaatacttcattatcacaatcatatggatctggtgtcaaaccttctatatatttacaagcttcaaatacttgtggcaaaatatcttcatatattcctgtacagtgatgtacataagggccacatactagtttatcctcaagtttttttagatcatctacttcaatccaaatataagtaccttgattaaatggtccaggaattgtttttgcttttcccattaataatgaatattcaccattatcaccatcaaatcttaaaattgtcatctccccttctttaattttcccatgaagactccctgggtgagaatgattaaacgcaaatggtgcccctaatcttggcttttcttccatcaaggaaatcggccatggaccacagtgttgtaataactcagcattgttgtttgttggatgaggaacagtccaatctgcaaagaaagtaacattatcttcaattgacgcagcctgtgcaataattgaagtgatagcaccatgaatatcagtttcacaagcaacaggaaatttttcatctgttaataaagcattagcagcacacggaaaaattcctaatactccctgcatagcgttccagcattgaacagccgcagccttacaattatatctttttgcaatacttttgattgctacctttaaagctgctacttttactaaagcttcatcactaatttcaattatagtttctttttttagataatcaattacttcatcttttttattttgctcaactgcatccatctcatctttaacttcagctaaagtaaccggatggatcttaatgttaaatttctctagtaattcaccttcattaaccatcattgtccaaaaaccagatggtcgcgttgcaatttgtaatattgttaaatcttttaattctttaataatatttaccgttgctaaaaatcgtcttatcccctcataaaattcttgatcttcaagacgacacattggcagatatgtgaatttacaccgaaagcgtcttaatacctttccagttgcaaataatccacactgactatcacgcaaacgacttccatcacctaaaggactttcatcacgcggtccccaaatcaaaataggaagattcattttttttgctacttgtgcaactaaatactcagttccaaaattacagtgaggaaagaacaaagcatccaccttttctttaatcattttatcaacgactttatcaacatcattatcatcaaataataatccttcgtcgttagcatcctcgatatcaacaaaagtaatattcattgttgctaatttttgtaaaatcaattctttatattttaatgcctcttctttgctaaaaatatctcttctcgtcggaataactcctaatttaatatttatcatttatttccacctcattatctagtttggctactgctaaaactccttttactgcttgatgccagccataaatatttgcatttctcaccttttcgtccatagttggaaaatattttttcttatcttcataatattccgtttgtccaaataattttaatcgtgaaatctcataagcccccatagctgaaagtgcataattatatgacaccttaacttcaacatttaaaatatctgcaataaattgtaacaaccctatatttgaaactgctccaccatcaatattcattatttgattagatgtatatcctaaagcagttgctgcatcatagatttgataagcaatcgattctaagcctgctcttaaaatgtatttataatcatgattacgagccagcccacaaatgcttgcacgcgcttgatcattccaccaaggaacacttaagccaacaaatgcaggaactagataaaccccgtcattattctctatttcatcccagatgctatttaactgtgcttcttttttaaataatccaatttgattttttaaccaattaagagtatcacaactacaattaataattgcctcttgagcatagattatcctattttcaacacaccagcctactgcattgactattcctttagttagttgtggtttacaactacccgcattaatcattacacttgatcctgttcctaaagttactttcattgaaccagtttcaaaacaatgctgggcatatagcgctgcctgtgaatcaccaatcactccacagattggcacttcatgatctaagataccattaacatcactataaccaaatatctcgtcattatttaaaatggctggtaaaataattgatggaatatcaaaaatactacatagcatttcatcccatttcaaagtttcaatattcattaataatgttcgtgatgcattagtaacatcactaacatgttttttaccattagttagattataaatcaaccatgactccattgttccaaaagcataattatcaatttcatcaagtttacaattttcaatcaaccattttatcttcggagctgagaaatacggattgatttttaaaccggttaacttttctactaagtcttgatggatttttaatttttcacacattgaggctgtacgacgacactgccaaacaattgcatgatgaacaggctttcctgtccttttatcccaaagaatagttgtttcacgttgattagtaattgctattccagcaacttttgcgactaattcaggaaattctttttttagcgtactgacagccttaagtaaattagtataaatttcttctccatcatgttcgacccagccgttttgaggataatattgttgatgttgataacttgaagaagccagcatattactctcttcatcaataataaatactttggttgaaaaagtactttgatcaatcgttaatatatacttcattacttttcatcctttaataactgtttagcaattgaaactacattttcttttgttaaaccatagtattcaaacagctgctgcgagtttccagaaattaaagtttcatctggaattgctaatgtcttcactatacatggagcttgattagctactatctgactgacaatgcttccaagtccaccattaatgctatgctcttcaattgtaataattctttttgtatcttttgctgctttgacaattacttcttggtcaaacggtttaatagtatgcatgttgattacacgagcctgaattccttgaagctctaattgaatagctgcatctaaagctaccctgaccatctctccatatgccacaatagaaagatcatcaccatcgtgcattattttagctttgccaatttcataatcaaaattatcatcatgataaacttcggaaaccggattacgcccaactcgaatataaactggtccatggaaatcagccaatttattcatcattttttttgtttcataaggatcagccggaacgatgattgtcatattaggaatagcatttaatactgctatatcttgtaaagaatgatgtgacattcctaaagctccatagctgactcctgcactgattccaatcagtttgacatcagttttagaataagcaacatctactttaatttgttcaatcgaacgcattgttaaaaaacaagccggtgatgcaacatacggtttcattcctgcagcagctaaacctgctgcaattccaactaaatcctgttcagcaattcctacttcaatgactcgatctggaaattctttcgtaaatggagttaatgaagcagagccacgagaatcacttgtaacgatacaaatcttttgatccgttttagcgaactcttgtaatttttcacaaattactgcacgattagcaattttatttcccatttataaatcccccaattccatcaatgcttgcttatactgtactgcatctaaaacaccatgatgccatgatgcctgattttccataaaagaaaccccttttccctttactgtattagcaagaattaaagatggtttattttttattgcttttgcttgagtaaatgcattgattatttcttcataattattgccatcgatttcaattacttcaaaaccaaacatctgccattttcctttaagatcttctaaagtcataacagtttcagtacaaccgctgatctgcaaatgattacggtcaacaatagcacatagattatccaacttataatgtccagcagccatcgctgattcccatatagaaccttctgccagctcaccatcccccattaaaacataagttcgataatcctgccccatcttcttcgctgcaatcgcaagtcctacgccaattgctaatccatgtcctaaagcaccagtattcatttccacaccagccactttattgttaggatgaccaatatatttagtattatatcctgaaaaattatctaactcactgtatgcgaaaaaacctcgcttagccaatgtaacatataaagcttctgcaatatgtcccttacttaaaatgaaccgatcacgattttccatcttaggattatttggatcaattcttaattcgttaaaatagagaacatttaaaatatcaattgctgataatgaaccaccaacatgtccggcttttgagtgatagcatacctcaacaatatcctttcgcaattcactagactgtctctctaataactctatctccatctgttagctcctttcaagtaatcaaattttaaaatatttattttactatctttttaaacaattgatcatgcctttatcatttcactaaagacatgatctttcttacgttgatttttaataatcatctctgccaaactttattaaatagcattaaatatttttatttggttttataatctattattttcttgattatccatttaataaagaaaggagtacttacaatacatttaatttatatattatttcaacacctgtgttttattataatcaagactatttgtgaatagtaaaactttgttaattaggcttcttcgtgtcctttagcactaatttcttctttgtagcgttggttatctgatactttgaagaatggataccaaactaaacatccaattgcgatacaaacaacttgaagaactgctgcctgccatccccctgctaataatggtttaataataatcggcatacaccatggtacttgaactccagttaatggtggaacaagcccaattgccattgcaaaataggcaactaatgtttgtacgattggtgttaaaataaatggaattgccagaattgggttcataatcaatggataaccaaaaacaaccggctcattaatagtgaataaacctggaacgattcctaatttgcccatttctttattttgtttagatttagcaaaaagcaataagatgatacataatgacaatgtccctccagcaccaccaattccactgaatgcatcatagaatgtattccctaaaatattaggaagttcctttccagctgcatatgcttccatatttgctgttgccattggtaaatataccgcagtgattacccctgaaataacatttgaactaaaagtaatacaactaatgaccagacgcttccacccaatgcatttaaaggtgtaacaattactgaatagaccatttgtgaaaatgatccccatgaagtaaacgaaaaaccaaatgaaacaaaaatgaaaataaatccaactaaaatacctggaatcaatgccgagaacgtatttgcaatcattggcggtactccctctggcatatgaatctttaatttttctttagtcataaagaaacaatataaacgtgtggcaatcaatgctgcaatcattgctccaaataacccctgtgcccccataaactgcatcgataaagcactttcttcagttaaaggcgttgtaataaaaaatgcaaatattgaaattaatcccgcaggaatttgatcacatttaaaatgaccagctaaacgatgcccaattaaaaatgaagcatagatagataaacagcttgtagtaactgtggatgctgctaagaaatatttttctatcccagttgattgaatgaaattaagccatgggtcaaagggaaaaactccaaataataatgccagtgaaccgatcattaaaattggtaaagtccccatcaaccccttggaaattgaatcaagataaatatttgccgctatacgaccagacacttctaatgctttgttaataaacttgttattttccatattccgtccctcttaatataaattaaatgaatttgtagtgttgcaacattctacattattactatactaaacgtttttattatcatcaatataaaaactaaattttttatataaaataactaaatattcactaaatataaaatatttagctaaattttagctaaataaatcttttttatatcggtttataactattttagttaaaatattcaacaatcactaaatatatttgtaatttatttagtgattgtttataatagccttaagagaggtatacaaaatgaaaataaaaataagtgatattgcaaaaaaagcaggagtatctgatggtactgtctcaaatgcactaaataaccgtaaagggattagtaatgaaaaaagagaatatattttacaaatagctcgtgagatgggatattttagaaaaaatagcgatcaagataagttaattcgtctactgatcgttaataaacaagctcacgttgttggagatactccatttttttcagaattaatcaggggaattgaaactgaatgtagtggacaaggattcgaattagtcatcaatcatgtagatgcagaaatcttaaaaaatagacgtttagaagatatattaaaaactgatcaaactagtgggattcttttattagggacagaaatggaagttcaggatttgaattattttagaaatatttgtattcctttggttattttagatactgcatttagagatactaattttgattacgtcgccattaacaatgttgatggtacctacgaaatcgttgagcatttaattaaaaatggccatacaagtattggtattattaattcatctcatcaaatcaataattttagggaaaggaaaaatggctatgtccatgctttaaatgataataatttacttttatcacctgaaaatgaagcattagttgaaccaacgcccgaaggagcatatttggatatgaaagcttttttaaattcctttttagcagaatttcctaaagaaaaattacctacagctttctatgctgttaatgacaatatcgctttaggagcaatcaaagccttcaatgaattagatttatctatttcaatatgcggttttgatgatttgccaatttgtgaattaattactcctgcgcttactactgttcatgtcaataaacaatatttaggcaaaactgcagtatcaagattagtacaaaaaattaatacacctgattatgatattcaaaaaatattaattgcgacaaaaaccattcaacgtgatagtgttaaaaaaagataaaatcgttactgtataaaataacgattttttaatgtttgtttttaaataaaatcagcgcctgctgtatcttataagtacgataaaaatcagtcaacatcataataactacataccctaaacaaaataacatgtataaattagtttttataaataaacaaacgatcattccaatagctatcactgttaatgttactttaggatattcaattaaatcaatgattagataatgccatgcctctaaaaaaatactgattaaaagggccaacaaaaaatataatataatcacttgaaaatcagtatttacaatcactgtaggagtaattagatgcctaaataataagatataaataaagctcaacgatagatttatgcctattctttctagcacttcaatcaccttatttctaacctttctttaaatttcttcaaataacttcttgttaggactagcatgattccattttgcatatacaaggtataacgagaattcagttcaggcagcatatactcaatataattaatatttacaattatcgacctatttatccgaataaagctatatttatctaataattactctaattcatatagtttataatgacataggtactgacatgtctgtgtgtttaaataggcctctttggaaaatccttcaatatagacaatatcttgataattaatcctatatatcttctcagcaagataaccaattaaataccgttcgagcatctcatttaaatcactttcaacactttttaaattattgagtgtaaaagtataatgtaaccctgcatattctattccttgttccactaaaataatatctaattcttgataacgagcaaaaaatgtttctaatttttgatgatgtttctcattacatattaatttcaattttttagctccaattgatataacaatgttttgcttttattattttcatcatatagaattatttttagctcattatcgtttttaattggtataacacatggtaaaccagaaatataattgttcttaatttcttaattataatacagctgatattcatgatttccctgaatcaaatatgctttcagtattttaaaattagtatttttaaatgaatgtctggtttctttaatacattattttcatctatttctaaattttttatttcaatttcattatttcgatatccataattattactttttactttagtaagattaacattcatgtctagtggtttataaccatctttatcatataaaacaattgaaatatatggaccataatcgtactcaagatcgttatcaaaataaacatagtcaaagattaacttttgatatccagagtgctgtccatcattttcactagtaatatcgatagtatcatccggcaatactgaattatcattaactttaatactcacttgtttagaaatttcaatgagttcatcacgaatataaatacctgggtatgcaacaattttagtattggtcgttttaagtgttcctgttttattattactctcattccaaatagaacaatattcaatgatcacatcatcatttcgataagcataaatcgcataatttgtaaaaacacttcgatcctctaaacgatacattatcggatcagataaaaaagttattccacctatactcatgatcaaagctatgattgcaattagccgatatgttttctttcgtgggtgaactcgcttgattaaaattttcgtatatcgctcacttaaatactgatttatcttatttaagtgatacgtaatgcagcaagccttataaaatatatatccatagattccaatcatagaaaaccatagtaacgaaacgaataaaatatttaatatcggaaatgataaaataaaattgataattataaagtttttaatatgtttttgatatttttcaatttcaatataatcgctacttattctctcaattccttttaatacaaaatataacattgcaaaactaatcaatcctttaacaaaaacaaattcattaaaatcaataccttggttcaataaaaattactatacataaagctattgttaaaattaatgcataatcaagatacttttctcttaaccgtttacggatacataaaagtcctaaaatcatcaaaagagccgaaatataggcaggaattaaatttacatcattgatcgttaatttaagaccatacataaaaataaatgctaatgcgattaaaccaatccccataattattacctctctctacttcaagtatatctaataatttagattgtttcatgccttttggtctaaattgcattaaattagcctgaattacaaaaaaatcacagtaaatactgtgattaccaacgttttataattacatgcagcttagctagatccatctctaaaattttaccaatttccttttttaaataaacttcatttaattttgtcttggcaataaattcgttattattcttttcaaattgagctaattttttaaatctctcatcttcacatagatcataataatagccatcgtcaaatgatacaactaaaatatactcatgtggttctttattactacggtgactataccaatatacaaataataagattaaaatgattgcaaccgccccaataatataataaatattcattcttctacctccgactatatcaatttaactaaaaaaactttaccttattattagtaacaaatttgactttgaataatttttttacttaatcatctaaattataacattttataaaaagaaaatcccgtagaataataacattctacgagatctgggaagtaattcatttactatttatattctatcatatgataagtattttttctaccaatccagctttaaaaacaaactacccttttagtttattccgctgctccatttctctttttactagagtactttcataattatctattttatgctttaaatagctgatgatcgactgtaattcttcaacttgtgcttctaaatttcctaattgttcgatcataatatcttttctttgagaaatcgtatgctctccttcattaaataaatctacatacaactttatttgctcaattgtcattccagcagcccgcatacatttaataaaattgattcgacgcaaatccggttcctgataatctcgatgaccactaatattttttgctacaggattcattaatccaattttttcataatatcgtaatgttgtcgaactaatcccaaattttttactaacttctgcaattgtcattttcatcaccctctttatataattataagtcataatttgtagaccttcaatttttattttaaccgataaatcttcatttgagctaagcaaagaatgacaccaactatttgcattaatgccccaagataaaaaatcatccgataaccactaaaggcagcaataattccccaaacaactgaaccaattgcatacccaatatccattgcagcataatatgtcgcattagcaataccgtttttactttccggcattcgcttaattaaaaatgtattaacaatcggggcaacagctccagttgcaaatccagcaggaagcgctaaaaacaggagttggtacatcctagttacttgaccaattaaatatacactaataaaaaataataaagaatttaataacaacattttgaactcaccaaaatgaataactagtctattcataataaaacgtgaactaatcattccaattgcatttactgaaaaaaacattcctgctccagcaaatccaagactaattgcatatagagaaacaaatgaggtaattgcactttgcgtcaaggaattaaagaataatactaaaatcggaacaattaaaataagccaattaatagtttctttctctttattttgattttctatgctaacaattgatacatctttacccagcagcattaacccaaaagttaaaatacaaattaataatgaaacaataaaaagcaatttaaagcgatcataattagctcctaaaatactataagcaatcgatggtcctactacccctgttaaactgttggcaatagaagcataactaaccccttctaataatcgattaggatgacacattttggcaacatatgtactagccccagttgaagctattccaaacccaatcccttgcattattcgataaataatcgccaattcaatttgcttacagtcaataaagaaaaatgctgcagccatcatcaacgttataccacctaatattacttttttacacccaaatttatctaacaaaatacccgcaataaaacgaacacacaaagctgccaaagtaaaaattgatgtcatcaatcctgcgtatgtatctaatccagttaaatttttagcaaaaatcgttagaaccgacaatacaatattggaacaaaggcatattgcgaaaagaattattactgataatagatacttttttgtccaaagtttttctttcacgactattttcctactcgtttagcattatcagaatttggatcccaacgttctgcctttaaatccatattatctaatgctctttttatatttttcaaatcaacctcatctaaaataactttgctggctttaatattttcttcaatccgacttagctttcgacttcctggaataggtacgatccaatcaccttgagccattacccaagctaaagcgatttgagctggagttacctgtttttcttttgctaacttcttgatcaattcaactagtacttgatttattgccatattctcttttttaaatcgtggttgtttacttctagtatcatttttagaaaaagtttgattagggtcgatcgttgctgttaaaaatcctttacctaatggtgcaaatggaataaatcctattttcaattcctttaatgtatcaagtaatccatttttttcaggttctctaaaaatcatcgaatactcactctcaactactgtaagtgggcaaatagcatgagcttttcttattgtttcaacgcctgcttctgataatccccaatgctttatttttccttccgccatcaattctttcattgtttgagcaacaagctcaatcggtgttttaggatcaacacgatgtaaataatataaatccacataatctgtttttaaacgtttcagtgattctgataaagaagtgcgaattacttcaggacgtgcatctaaaacctgctttccatcaatcaccttgattccacacttagttgcgatctgataactatcacggggatagatactcaatgcctgtccaactaaatcttcattatataaaatttctcctgtttcactaacaccttgataacactctgcagtatcaaacattgtaattcctgcttgataagcaccgcgaattacttcaatcatttctttttgatcactcgcatcaccaaaaccatgggtcattcccatacatcctagaccaattgctgatatttcaaaattactaccgagttttcttgtttccattttctcttcctccaatatctttgataaatacatcctaatacttagagtcaactataagtcaatagttttaactaaaaaagaacaactcccttatccataaaattaatagattgtttttcgtaaaatacattattttactcgttttactaaatagatataaatgttgataaatttaagcaaataatcttgaaaaattaacatataatggtacaatacatacggtcttaaatatacaagctgattacagggggaaaagccaatgaaagcattttcacaaatgaacaataatgagttatgtgaattaaaaaaagaattagaaaaaagatatcttgatttcaaagcaagagatttaaaattagatatgtcacgcggtaaaccagctagtgaacaattagatttatcactcggtttattaaaacaagaagattatatgattgatggtattgattgccgtaattatggtggccttgaaggtttaccagcaatgcgaagattctttggtgaattattagatgtaaatgagaaaaatgttattgtaggtggaacgtctagtctaacattgatgtatgactatcttagtcaagctatgttattcggtgtcatgggaaatactccatggtcaaagttagataaagtaaaatttttatgtccagttcctggatatgaccgtcactttgctttttgtgaacatttcggaattgagatgatcaatattccgatgaatagtgatggtcctgatattgagacaataaaaaaacatcttcaagatgaaagtgttaagggaatgttctgtgttcctaaatattctaatcctcaaggaatcacatatagtgatgatattattaaagcaattgccagtttaacaccagcagcaaaagattttagaattatatatgataatgcttactgtgttcatgatttgaatgagcatggcgatacccttttaaatatatttaacgaattgcctaaatatcagcatgaagatatggtcatcatggtcgcttcaacatcaaaaatcagttttgctggagcgggtgtatcatgtattgttgccagtgaaaataatattgtggacataaaaaaaagattaacgattcaatctatctcgcaagataaaatgaatcaattaaggcatttgaacttttttaaagatgttgctggtttaaaagctcatatgaaaaaacaagcagttttattaaaacctaaatttgattgtgtaatcgaacacttaaataatgaattaggcggtaaaggaattgcttcatggattgaaccaaatggcggatattttatcagtctcgatgtaatgcctggatgtgctaaacgaattggggaattatgtaaagatgctggtgtcgttttaacaactatcggagcaacttacccatatggaatcgacccacaagatactaacattagaattgctccatcatatccttcagttgatgaattatcaaaagccgctgaactactatgtatctgtgtgcaattagcttgtttagaaaaactattaaaataaacttagcgaaaggaaacttattcctttcgctttttatttcttaattttccaattacagccatcactattaatgtgagagcagtaataatatataaattccccaaaataaaatctaaaccattattatttacatgaatcattagatttggacaaataactgaaaaaattaaaaatactgtaccgaaaaataaaccttttactagactcgctgatacatcattttgatgacatgactctttaatattcatcttcatcaattctttttcatcaatactatcataatagaagattgcatcattattaaattcatcattagcgtaattattttcaaaatactgccatcccaaattttgatatttacgtttgattaatactaagtcattggaatcaacaatatagatacgttgcaaatcctttttctttttaaattttaatacatctaatcttaaaggttgaaaaagaccaaaaggaataatagtttccaaaatataattatgctgtacttttttatttaaatacttctctagttcctgacttcctaaataaagcttgatcctcatcatttcaatcattcctttcaattattagataatattgcattaactttaacaatctcattaaaatattcatctcgtgttagaccatgtcgatttaaaattttatcgatcttaccatctttcatatataacattttagttgaatacgaggcaacaaatgcatcgtgagtcaccataataattgttgtttgagaatcatggttgattttcgaaaataattccatcaattctctagaattattactatcaagattaccagttggttcatcagcaataattatttcaggtttactaattagggctcttgcaattgccgctcgctgctgttgcccaccagagcactcatatacatgtttatcgagtatgtccttaatacctaaaatctgtgtaacctgctctaaattttcctgccattctttttcaccgatactatttataattaacggaaaaagaatattttcacgaatcgttaaagaataaagtaaattataattttgaaaaataaaacctaactttttctttctaaattttgcctttgctgccccactcatcccaacaatacttgcacctgaaatattaacaattcctgaagttgctttatcaattgttgataaaatatttactaaggtcgtttttccagaaccagaaggccccataatacaaacaaattcattatttttaatttcaaaactaagatcatctaaagcaatttttggtgaaggacctagttcatcatatattttctttaaatttttaacttcaagcataatatttgtcatttttaatttcctcctttctttcatatagaataatcatttctgctaacatataaggaattagatattcagccataataataaaagttgtcattattcccattccctgattaaaataaaagacaataaaaatattaaaaatataaattattgacaatatccaaagatgacgaaaataatattttatttcctgcatataaacaaaatcaatttctgctcttgcaaagccaagttgatagatggcatgaaagtgttctcttctttgtatatgatcaattttaaaacgatttataagcgtcaaactcaataatatattggtaataacaaatgcaagatgcatctcaaaattgaacaaactattatcagtagtcccacaaatgaatggcacgattccgatcattgctaccattaagattaaaataaaagattttgactgttgcataatcaaacttacatcttctttaattaataggtcttttgccgttttgcagtactttaaagcatttctattatagtgatgtggtaaataatgccgaaacactccataggcaccgactgccccaaaaaatgaaaataagatatatccaccaacttgattatttccagtatacatacatattaagccaaatatataaataagaggataaatcccatccggcggttttattgcacgagtatcttttttataactaattatattatgattttcaagtaattctgttattccagtacgcataataaaaccactattaaataacataattaccaatatcatcgctaaaattactgctaatccctgcatcaaagcatcaaaactaaggacaaaaatatttgcatcaacacttaaaatttcgtatatcaccattttaacaattggacttattcccaaaaaaactataattccaatcattgaagaaaaaaggacaatacataatacttgaaccaaactgtatatagttcgtttaaaaaagcttagccctgataagacaattaaccccatttctctagatttaagtctaataaaataattgcttgaatataccattaaaacgacacacataaagatcataaaaaacgttaataacgcattatataaaaattgaatatttaaaaaatctaaattaccactaatctctggtgattttaaaatttccataaataataaacaaacagttactgttgaagctatacaaatacataaatcaacagcgctctttttttctaactttaataagtgcaatgccattttaatcatctttacaatctcctctttttattaactttgcaaaacacttattaatacttttgctagctcttttgaatatctcagtatatggtgtttttaaagctttaaattgttcatttacaagtttatcaatactatgctcattatcctttaattcttttaatggataaatataactctctttcataattgaaatataattctcacgaggattatctaaattatattcttgggaccaactgctaaaatgtttatttaaatatttatttaacattactggatcatttctatctcgataaattctaataagacctaatggatcatttctatctcgataaattctaataagacctaatggatcattgatcggaacagataatgaaactatataattaaatagattatttatctgactattattcattatttgaaaagaatacgtatcactagtagtatgaatatcaagatcaacataataattcaaaaagaaatatgccttaccatcacacccctttgaactacacatcgataaatcaatctgcataatgtcattacaattaattttcacttcattaaaacaaaattcattttgattaatcaacagaccctcgtattcatgatttatagaattatcaaaaataacctctactttatgccgttgtatatatgctttaattttttcatcaatatcttttaactcaatttgtaattgttcaatatactcctgttttctttcaagtacatatctaattgaaagttcactattcattattagttttatctcatcaatggatatttccattgaacgtaatagtaagaccatttttaatgtatcaagatctttagatgaataattccgataattatttgcatctctttgacaaacaactaagccttctttttcataataaattagtgtttgtttagttatgccaaaaattacttcaacctcgtgtgttgtcataataaaacctcccttctacctaacatttaacactatatactaagaatacagtcaaggattatttatcaaacaactcaattaattgctttttaaaactatttccaattggcaatatggaaccatctaccagttctacgcaatttgcagcgattttaataacagcatgaagattaacagcataagatttatggatttgaataaaattttcatttttcatttggcagacaaactcgcttatattttttctttcaatatattcaccactattagcatgaatatgaatgtaatgtctaaaggattcaacataattaattgaacttattcttactttagaaatagttccgctattttgaatttgataagttttaaatctttttaccatgacatcaccaagctgactcatgagattatcaatatcttctataaatttattggttcgaatataattaaaggcttctaactcataacctttttttattagctctaaatcttctaaaccaatcaatacgatgatttgctgataatcctctaaacgaatcctctttaaattttcaatttcagcaatatttttaatttccatcatataaacatcataattaactgcttcttggtaatccatgatttgtagatcatcacataacttaagcagttctatttttaagatatttttgatatcttgattttttattgccattgcgatcctaatcatgatgaaccccgctttcaatttcatcgatatattgagataccatacgtttaggattagcaataacttctaataaattatatggatcattaagcgttattccaagagactcaatatgtttacaagccattacaaacttttgtgattctcttgtatagagtgcttctagttctacagtagtaccatctttcattgtaattgtaaaagttataggatgcccaattaaaccaaaaggaaatattggaacatcatgccaacctaaatcaatcctatccatctgttgaacttttaaagcgaggaaatagctattttgctgtttaggaagataaaaagctttgattctagctgtaaattttctaaacgaactatatttaaatacctcttcatcgatactccaccacattccagagctataaattattggaccagcaataaaaaaattaataattaaaataacaaggcctaaaaaaattccattgacgattgaagcatggtattgaacttcaaatacaatcaacattgtcgcaaatggtacccatatcaacatattgacaatagctaaaatccttcgcggttttccgattacatattttttcacgtccatctcctcctaattttattttatctaattattattaaaatgatatacttatggcacgtattgagatttactggcacaaaaaaagattaatgattctgctcattaatctttaatacgattttttcgatattctaggaaatcattaaagaacatccgaattacacaaattaacggaactcctaaaaacattcccaagaatccaaagagactcccaaatatggtaattgagcaaataatccaaaatggtgatattcctacactatcgcctaaaatgcgcggtcctaaaatcaagccatcaaactgctgtaacgcaaaaatgaaaagagcagtccagattgctggcattatcccatttgttaataatacgataaaaactacgggcaccccacctatgaatggtccaaaataaggaatcatgttggtaataaaaacaacaaaagctaataatgggaaaaacggtaagcccatcagtccaaatccgactagtgcaatcaatccaataatgactgaatcaatgaatttcccataaataaaattaccaaaaatacgatgtgatttaatcgcataaccatgaattaaattcaaattttcttgactaataaaacaaagcataaaacgatcaaaaatacgtgcaagtttttctgcttcaatcaaaatatatggacaaaagatcaagcccatcaaaatagttaataacgtactccccgttttacctgcaaaagcaattacttccataaaatcatttgcgctaagacttttgatagaatcaacaaaagtctgctccacctggataatcgttcctgctaaattaggatcttcaaaagaactatttatcgatgcttcaaaactcctaacatatgtatcaatatttttagcaaattctactgcataatccataaccataggaattaaccaggtcaacaacaaaataatcattaaaattactgccaagctcactaataaaacacttaatacacgtctatgctttttcaaaaatgagctttgacagttttcaaacagtttagtcaccatctgtactaacggctctaaaaaataggctagtaccccacctataataatcgggaagcacgcatttaataataccgaaaaccatgatggttcaaataccttataaacaactattaacaaaattccgattattaacagtccactatattgttttaatttatctttttgcatttataattctccttagatagttatcctaattataccataattatgcaggcatttcccctttttattccacttatccaaaagttgctctatatacgacaacgtcattacttcataaacctctttactaactagatcatataaatggaaatcatcattaataacaactaaagttagaccgtattcacttaatttttccaaaataaaaccctcctcaatgcagtttatgcattaaaagagggaatattactcatatacatgatcaaacttaaagaaagcattacaccgccaaatacatcactaaaataatggactcccaaatatatacgacttaatgtcacaaataatataattattatacatccgctgatcaacaacttgcgatatttcaacttactatgatacaaataataaataaacaatccatatagacaagttattgccattgcatgtccactaggaaaactataattagtttcgttgactaaatgcacaacacttggtcgaggccgcttaacaataaactttataattcgattaagcagctgctggataaatgacgctgctaagcaaactagagcaattcttttactgattataaatgcaacacagattgctccaataatcccaataaaacttcctagatgagttaccataattacaattggtgttactctttcattaatcagtatttgcagcaattgataaacaaaattatcgattggtttaattattccagtcataattagaaaataatcaaggataaacaaagctaatgggattaaaaaaaaccactgtttataattcttttttaactttaacgccattttctttaactataaatgctggtaccccaacaactgtacaattatcagggacatcctttaacacaactgtttgagctccaataatactattattaccaatcgtaacatcaccaataacctttgctcctgctgaaaccatgacattattcaataacgttggatggcgctttactttgtgttcaccagttccaactccacctaaagtaacaccttgatataaaacacaatcatcacctatgatcgttgtttcaccaataactacccccataccatgatcaataaataaacgctttccaatagttgccccaggatgaatttcgattcccgtaaaaaatcttgcaatttggctaaacatccgtgctaaaaattttaaatgcaatttcttccacaaaaaactattgatccgataacaaaacattgcatgtaccccaggataattaataatcacatttaaggcatatctcgcagccggatccgtctctagtactttttttattaaactcctattttccatactctcactccttctagttaatatatcgataaatcatcaataatgcaactaatatatattatatttatgaaattttttattttttttctaggcaaaaattaaacagaactcatcccccatgagttctgtttaaacgttattagatactattatagtgtgtatctttcttcccctacataaatcattaattgatttataaatagattatagcttctataagaaaaatgtcaatataaatattgaaaaaaactaatttttttattattttttagtatattcataaactataaagtgaaaatcataaatttgtatacaattatacactattcaaataaaaaactgctattaagcagtttttaaattccatatagttttaaaataacattataagctttatcaataatatttttagataaacgaccttcaatcgagaataagcgtccatatgtagtttttcgaagttccttgtataatttaggcttggtatattttaaataactccacaaatcatctttatcttgaatactctcaggtgaaccatcatgagataaaagagcacaagttatcaaagtaatcattgatagatacttgatcatataatgacgttgcttacgagagcgcagtgtataaatatcataataatcaatatattcacgtgctgtatctaataatgcaggaataaaaatatcgttattaataacattttcaaatggattacggccaaaacagtataaaggcatgtcgatatagcaaaatgatctaatatatggaagaggagcgtaggcaaacatctccatataaaaagttgcatttagaggaaaattatcaatcacttctttaataatcttagtttttataattaatgccggtgttaataaatattgctgttttttgaaatgttttatttcatgccagccaaaaattttatcacttggcaaaagcgaacgatagcttactttgcgtggtctttttccataacaacaaaaataatcggttactaaaacatccagatttgcttgtactcgaataatatcttttaatgtttcaatgacccgtactaaagatgcctgatcaaaccagtcataactattcaagagtttaaaatataatccggtggtatactgataagcacatttaatatcatcgatattttcagtatttttaataactttaaaagtatcagggtattcattttgatattccattgctacttcataagtttcatcagttgaatttttatcaataataataacttctagttcatcttttaataataaacaggaacccaatgctttgtgcatatactcgattgcgttgtaacaaggaatacagatagttaataacttcataatagcctccatttatattcttagttatatcttagcatatttatggcataatatatagttgatattgcatttgggacgattttatggtattttatttaagtatacgttaaaggagaattgctatgtatttcgtaataaattgttttattagtgcagtatgtattatttctttaattttattcactgaagtctttcctaaatggactaaattattagttggtgccgtacaagttgttacaacttcttatgctattgctattctaattaaaaaaatcggtgaatggacttcggtatggtcaggagattataaatacattaatagtaatttcttatggatcctacctatcgttgctgtaattactattgcagttgcgtacatctgtaataaaaaatcaaaaaaagcagcaaaataaaaacatgaattcaaattcatgtttttattttatacctttttctttagcaattgcatctaatgttgctgccatccgagttaatgcttcgataacttgttgatcatcacgataaacacctaatacaatacgtagatgtcctgctccaccgggtccataattaattccatcattaaccgccactttagcttcactaataagacgcttacaaatcgcactactatcgcctaaagcgctaacatcaacccaggctaagaaaccagaggctggcaattccattgaaaccccaggtactgtatttaaaatattgtaagcttgatgacgacgaatatcgtaagcacggttgaattcatccataaattcaggatgcttaaaagcttcaattgcagcaatttgactaacagtattagttgccccaatcacacttaccgcacaaccatacatcacatccataattacatcacttgccataatatagccaactcgataaccgcttaatcccatccctttagaaattgaacaaacggtaactgtatgttcaaacataccatctaaagccatcggtgcaataaactcattttcaaatgtaaaatcttcaaaagcctgatcacaaacaagtactaaatcatgttttaaaaccacttccctaattgccataagactttcatgattatagactgttgtagtcggattattaggatgagttaaaacaatcatcttagtcttgttactaactagtgattctaatgcttggtgattaatttgataatcttcagcttcatttaattcaagaactaccggcgtagcctgcatcattgtaatattttgcatattattaggataacttggacaaggaatgattacttcatcacccttttccaagaaaggatacattgcaaagaataaagcactatcacttccaggcgtaataattacgtttctagccggatttaaatctaccccatacattttcttggctttttgacaaatcattgccctaagctccatatttcccgttggagcagtgtaatgcgctgctacaggagattttattgcttcaagtgttttttccataatatgctcaggaattgaaaagtcaggcataaaaggatcggcccatcccattaatgctactccattttcagctaatttagcaaaactatcaccaacatccgctttttctacctcgctgaatagcccgccttcaaaccctaaaaactcttttttcattctatttttcatcttagtacctacttaataaaataaatatttttacgtcccggatgtaaataaattaatccatctcgagtaaatgctactgtttcttcagtatagaaataataatcttggccaaaagctttgctctttgtatttaattcaagtgcatatgttgtatcatatgacattaacacatcacctttaacaggaattgctttttgattattccataaaccaatcgttgtccctggcccatgaccataaatattacatggatgagaatataatacagcttcaattccttcatctttaccttgtttcaaagaatctatcaaaacatcattaccacttttaccatcagccatgttttcagccacaatgtcttgaaaacgatcattaaccttcattccatcaagcaattcctgtggaatactctcttcatcatctttagcaatataagccaatctttgagtatccgtacaaatattcaaatatttaattccaaaatcacaatgtaataaatcacctttttcaattacaccaaaatatcggggattatctaaaccaggtcgttgtaaatcaacagttggttcaaaccaataatctaatcctagatctttaacacgctgcatcatcaaccattgtaagtcctcacaagtagtaacccctggaataatactttttgaactaaaagcttcttcaatcacagaaaaagcaacctccataacttctggatgtaattctaattctaatggagtacgcaactccatcagcttaattgccaacatatcattacgtacgattcgttcagcatattctggagccatttttgctgtaatcatttcatataacccctgtgtcaatccatcactaaaagcaaaattatttgaaacattgactgcaattgtttgtggatcatattctttgcataaacgatttaaacaagccatttgatcttcattattaaaatcagtccaataacttgtataatatggcgctaattcctcacttggcatacagagagaaaaacgatgtatattatccccctctttaacaaaagcaaacaatgaaattcttcgtgcagttggataattagctggtgtaattgcatgaaataatggatcttcattatattctttagaagcactgatccacatatcaacatcatattttttcattactttaggtaaaataagctctaatcgttctttcaaacaagcatctttaatttgatattgttcttttactgatctaatctctttcatagtttcctcctagaaaaataaggtacacaaagtgtaccctattttatttcttatttttcaactttagcataagctaattgataatgtccttctggtgaatgagttacacctgttactttagaagacattaagtatggttcagcatatccaaataatggaattacataatgttgttcaccaactaaatagttttctgcagcatgtaaagcattcatacgttcagttttatcatcaattgcattagcagcagctactaattcttcgtatttagcatcatctactgtgttacctggagtagttgaaccaacatacattgataaataagccattggatcgatgaagtcagcagtcatggcatgacgacagatttcgaaatcacctttgtcacgagcatcaaagaatgcttcaccctcagttgcacttaaagtaagatcaatataagcttctttcatagatgcttgcattgcttgagcaacgtttttatgcatagtgttatcattgtaagtatatgttaattttaacatattactttcactataacctttagaagtcatgatagcttttgcttcatctaagttataagtagctaatttttctacagcatcttgttcttcacggaagtcaccagttgctccaggaataccttttggaattaatccatttaattcataagcattgtcaccatatcctaatgcttttaaaacattagcacggttaattgataatccgattgcattacggatatcagcatcttttaattcttctcttgtattttcatcaccagcattgattaatacgtagtagttacatacaaaaggatcgattttccaagattgtttctttaattcatccttgctattgatagtatcaatgttacaagaagtagcgaaatctaaatcacctttttcaaacgcactagtttgtgcatccatatctgacattactttaaaagaaatagaatttaaagtaacatttttagcatcataatattcatcatttttttctaataacacttcatctttagtgtttacagaagttactttgaatgctccattgtaaggaacatcagaattgttaccccaagaagattttgtaatatcttcagcattttctttcaaataatcttctctaactggatagaatacagtgttagttaataaagaagtaaagtaagcacatttagattttaacttaatttgaatagttgtatcatctaaagcagttgctccaaagtcttttaattcatccatagtagtataaggagtgtcagtttctttacctgttttcttatcctttaccatatgagaagtaccatcaatatattgccaaataaattgtgtgtagtaaccaccagtagttaccgcacgtttccaagcatatacgaagtcagaagcttttactttttctccatcgctccatttagtatccccagaaatcttaattgtgtaagtaagaccatcttcactgatttcaggcatatcagttgctaaattagtaattacattaccatcagtatcaagtgtatataaaccttgataaacttgcgctaaaatgttagcagttactgaatcatcaacgattgcaggatctaagtcagcagtgtcttttcctactgcaactcgtaaatcggcttcacttccgccaccacaacctgttaaacaagttagagccattaagaagctaagaccataagctaatagttttttcatgttttttcccctttcaactatttctcatataagaaacatgccacttgacgatttccaactgtttttaaagctggtttctcttgtgcacatctctcagttgcctttggacagcgtgtcctgaagacgcatccactaggcggatttatcggacttggaagctcaccttccaatacgatacgttttttgttgcgtgctaccttaggatccggaataggtaccgaagataacagcgcttgagtatatggatgaagtggctcatgataaatatcatcagcatccccaatttcaaccatatttcccaaatacattaccccaatacgatcagaaatatgtttaaccatacttaaatcgtgggcgataaataaatatgcaattcccatttcattttgaatcttttcaagtaaattgataacctgtgcttgaatcgaaacatccaaagctgaaatcggttcatcacatacaataaactttggatttaatgcaagggttctcgcaattccaattctttgtctttgtcctcctgagaactcatgaggataacgacgaatgtgatctggtttcaaaccaacgatctctaataattcacgaactcttttttcgcgttcttcttttgtatcataaaccccatgaatatccattggttcacgaataatttccccaacagtcattcgtggatttaaacttgcatatggatcttgaaaaatcatctgcatatcacgacggaactcttttaatttagctcctttaatttttgtaatatcttcaccttcaaaaatgacttgcccttctgttggatcataaattttaaccaaagcacgtccagtagtacttttaccacatccagattctccaactaagccaaaagtttcaccaggagcaatctcaaaatccactccatcaactgcttttacaacttgttttttagctaagaatccaccagatactgggaaatgaactttaagtccttttacttttaaaattggttcactcattgtctattcccctttccttttcaaatatggattatttaaccagcatgagctgcagtgagtacttgaaaaattacgatactcatccatgtgatcaacacaaatattcattgcgttttcacaacgatcaaggaatggacatccttctgaaatatttaataaatcaggtggtgatccagggatcggatgtaattcttttttctctaaatcttcaggattggcaatacatgaaagtaatccttttgtatatggatgttgtggattatagaaaatttcatcagtagttccagtttctacaattttaccaccatacataatagcaatacgatcacaaatactagcaactactcctaaatcatgagtaatcatgataatacttgaatcgatttcatcttttaaacttccaatcaaatctaatacttgcgcctggattgtaacatctaacgctgttgtaggttcatcagcaatgattacttttggatcacacgctaaagcgattgcaatgatgattctttgacgcatcccaccagagaattgatgaggatattgacgaattcgatcttctggtgaaggaattcctactttacgcattaaatcaatcgctttatcacgtgcttctttttttgaaatttttggattatgattaataatcggttcaattaattgagtctcaattcttaatgtcggatttaagaaagtcattggatcttggaagatcattgccatatcattaccacgaattcgatccattgtttcttcatattttttacgactatcaaaatgagtcggtgctatttcttcaccatcaattttaattgacccattagttacactaccatttccagctagtaatcccataattgagaacattgtttgtgatttacctgaaccagattcaccaacaacacctaacacttcgcccttatctacataaaatgatacatcacgaacagctttaaccgttccattttcggtactaaattcagtagtaaggtcatttacttctaacatcttcattctataattcccctcctacttcttcttagggtcaagggcatcccctaaaccatcaccaataaagtttaaagctaacatagttaaacagattgctaaaattggccatacaacctgtaatggctgtgaactgatcatcgcccgtgcatcattagctaaagtcccccagctggcttgtggagctgataaaccgatacctaagaatcctaatgttgcttcatagaaaattgcacttggaactaacattgtaaatgaaacaataattggtcccatactatttataatcaagtgttttaataaaattctttttttgctggctcctaaaacaaaggctgctaatgagaattcttgttcttttaaagtcattacttgagcccgtacttgtcgagccatccccatccatgaggaaatacagatcccaattatgatcgactggaaatttgaacccaatacaactgtaatcataattaagtataacatatctgggatagaatataaggcatcaacgatacgcatcataatcatatcgacttttccgccagcatatccagcgatagccccataagtaaccccaacacataaagaaataattgcggctgagaatccaactgcaagtgagatccgcccaccgtacataattctaaccagtacatcacgaccaaagcggtcagtaccaaagatatgatccattgatggaccagcgaaagtattagccatattttgtccatcataagtgtatgatgagaaaattggcacaaagatacatccaattgccattaccaataaaaagcataacccaatcaatgctaatttatttttcttgaaacgattccaagcatctgcaatatatgttttactttcgtaagcgattttttcgctattctttttcgaatcatctaacttctcaaacatttctggagtaagttcgatgttcattaccttattttcttccatcttgcttcctcctattttaatttgattcgtggatctactactgctgatagtaaatcagtaataatattaaatgaaattaccaagaatcctaagaatattgttaatcccataatcattgaataatcacgagtttgaatacttgaaaccatttctcgtccaattcctggtactgagaatagagtttcaataacgaaacttcctgttaacatgtaggcaaacgcaggacctgcatatgtaataactggaatcaatgcattttttaacgcatgcttaataacgacctttttataaggtgttccttttgaccgcgctaagataatataatcttgacgcataacttcaagcatactacttctagttaaacgacataccatggcaattggataaaacgccaatgacaaggctggtaaaacataatgagccggtgaagtcagccccacaaatgggaacagcttcaatttaacccccagaacaatcattaaaagtaccccgatcaaaaatgatggtacagataccccgattgttgcaataaacatacaaagattgttaagccatttacgttttgataatgcagctgcagtacctagtgcaactccaatcactagtgctgaggcaaaagcaattgcacctagtctcgctgtaactgggaaactttgtgagattgttgtacctacatcacgtccaggacgaacaatactttcccctaaatcaccatgaatcaaatcattcatgtatagagtatattgctcaaatactggcttatctaaattgtactttttaatcgcaatttcgcgtgccgcttcatttttatatttttcaccactaattggcgaccctggtgttgccttcatcaaaaagaatgttgctgatgaaagtaagaacagtgttacgataccaatgagcacccgctttaaaacatacctaaacatttaatcacctattcctttactatatatctactaggataccttaatatgtatcaaatttcaaacatttttttacacgctaaccccatgagcccctagggattccgcccaaaaaccgcaaattgtatacgattatacacaatttgttggtattaaaatttttttataaataccatactttaattgatttctgcgataattataccaataatttattatcaagtcaataatttatttaattttgtattaaagcgcatacaatttaattttcagaataaatcccttttctcatacttttagcactatttgctgcctcaataatttcatttttataagtgtagtcatatccgtaatcatagaacttttcaactaaaccttcacgagcaatttgttcttgaagtaaatcaccatctacaaagacccatgctaataaacgcccatacttatctttactatcaccatctacatttaattccaattcgattttcgcagcattcgtcaattgtgtttttgtataatcgctcgcttctttaccatacggctctatctctttagttgattcaggtgtatcaatatataaaaaacgaacttttgtactctcaccatctacattgaaccatgctgtgtcaccatcaacacatctatctaaagttacttcaaatcgttcgcctgtgggaattgatttgttctgctgataaaaattgtaaccaattaccgccaagataactatgattccaagccatgatcttaataatttcttttgttgtgtttttgttagtttaatcttcttagccattaattccaaccgcctttttcgctaatacatcagctctttcattataaaaatcaccactatgggctaatactttgacaaatgcaatttttaaatcttgacgatactcttttactttacgctgatattcttgtgttcctggtttgtttgctttccacataccatttgcccatttttcaattccctcgtaatcaaaataaatacaaatttgtttataaccattgtttttagcaaattccattgcacaaatactgcctaaaatttcacccgcaacattacgcatcgaagcataattttcatcagcacctttaccatacatttctttgattactttttgttcctcaataatcacacatccaaaaccatattcatgtgtcttaatattgtagctgccatcaacataagcaattaaacccccatcaaattctatcttttcttctttaataaatacttttgcatcctctaatgaagtaaatgatttatatattgctcctttaaatttctcaacttgtttcttacattcatcccaagatgaataaattcctggtttgcgaccattttttactgcataatatttagccataacttctcctttaataattgataaaatgattttaaactagaaattctatttagtaaagaaacttaaagggtactaaagtaagaaaaattaatttccttagccctcaacagttgtctatttatcaataatgagtataattaatgtattaggttaaaggagaaataatatggatattgaagaaagatttttaaaatatgtaagcattgatacacaatcagatgaatactcagatactaccccttcaacgctgaaacaactagatttaggaaaagaattagttaaagaaatgttggaattaggaatcacagatgcacatttggatgaatacggtattgtttatggaacaattaaagggaatggtggtaccggggatatcatcggctttattgctcatatggatacttctccagatgctagcggaactaatattaaacctcaaaaaatcaataattatgatggttctatcatcgaaatcaataaagaattaggactttctttagaccctgaagaatttgttagtctaaagaaaatggttggtcatgatttaatcactactgacggtactactttattaggagctgatgataaagctggtgttgctatcattatggatttagcaaattatttgtatgaacatcctgaagtcaaacataatgatattaaaattgcttttactcctgatgaagaagtcgggcgtggagctgataatttcgatgttaataaatttggagccaaatatgcctatactttagatggtggggatattgaagaatataattatgaaaactttaatgcatatagtgctcaagttgaaataaccggaaaatcaatccacccaggaaatgccaaagataaaatggttagtgcaatcaatgttgcaattgaatttgaaaacatgctgccagctcagcaaaaagcatattttactgatggttatgatggtttcaatcatcttcaccatttagaaggtggttgtgaaaaagctactttagaatacatcattagaaatcacgatcttacattagccaaaaaacaaatcaatgattttaaacgtattaaaaaatatttagatgaaaaatatggatatgaattgatcaaactagatattaaagaatcatatttaaatatggcagaagttatcaaagaaaattattatataattgaaagattagaaaaagcaatgaatagtgttggaatccaaggttttgctagtcctatccgtggtggtaccgatggtgctcgcttaacatttatggggcttccttgcccaaacatcggcaccggcggtgataatttccatggtccatttgaatttgtttcactcacgatgatgaaacaatcagttgaaattttaaaagagctgattaaagagtagttttatgaaacgctgtttattcattattaatccgtcttcgggacaacggactattcaaaacactttagataaattaattgggcagcttactttgcgtcaattaattaatcatattgatgttttctacaccttaaaaaaagatgatgcttattttaaagcactaaatgctgacgaacaagactatgatttcattacagtagttggcggtgatggaacgatcaatgaagtagttagcgggatggttgccagcgataaaaaaattccactatgtatactggtagcgggaactgtcaatgacttcgcaaattatttgaacctacctagcaatatcgaaggagtttgtaatttaatcaataattttaagactgtctgttgcgatgtaggtaaaatcaacgaacgctattttatgaatgtggctgccgggggaatgttcagtgatgtatcattcaccgttagcaaagctgataaaaaaagattaggtcccttagcttactatctaaacggtattgctaatcttcctagtcaattaaatactaatattaatttaaaaattgttttagatgatgctaatattttagaaacagaagcaaaaatgtttatggttacaaatacaaatcgtgttggcggatttgaaaatattatcccttatgcagatattcaagatggaatgcttgatttaatcgtaataaaaaaatgttctgttactgatttagttgctctatcaaaagattatttgttgaaaaaacatgctaatagcccatttatttcttatgttcaagcaaaaaaaattgagatttacagccaacaaaaagttgtaattgatattgatggtgaagaggggtcaccattgccagtgacaattgaagcaataagccaagctatcaatattttagtaccataggagtttgttaaacagactccttttttattgtttgattatttaatttatattataatctatctgtacatcaaggaggaaattacatgcacccaaaatatcatttaacagcccctaaacattggatcaatgatcctatcgggtttatttattaccaaaataattatcatttattttatcagcattttccttatgaaaataagtggggaacaatgcactggggtcatgctactagtaaagacctagtaaactgggttgaccagggaattgcattataccctagtaaagactttgatgcaaatggttgtttttctggttcagcattagaagttgataaaaaaatgtatctatattatacgtctgttgtttatcaaaaagtcaatcccgaaaatattcataaaactgccccaggttatgatttttattctagccaaagtatgattataagcgatgatggatttaacttcgataatcttaatcaaaaacaattgatcattccagtatttaaagatggcgaagtcggtcatcctgttcatacacgtgatccaaaagtatggaaattccaagatacttactatatggttttagcaagtaagtatttagatgataacaatgattataatggtcaattattattttatacttctaaaaatgcaactgaatggcattatgctaataattatcgcggcattaaatgcggtgatatgtgggaatgcccagatatttttacagttgcccatcaggatatattgatcatgtctccagaacggactaatgatagcggctatccatctcacgcacgtattacaacagctaattttgatcatcaaaactgtcaattagagattactggtgaactaaattatcttgactatggtttagatatttatgctccccaaacaacgattgacgaagccggacgaagaatttatgtaggctggatgcgtatgcctgttgccgatgaagctaactggattggattaattacttatccacgtgtaatcacatatcaaaatgatgctatatttacgaatattcatccatctgtcgatagtctctttaaaaagcctgcaactgagtttaaagctacgcaggcatgcaagatcgtgactaatttaaaaacaggtgatttcataaatattggaggttatcttatcaagtatgacgattgtctttgtatcgatcgttctaatgtgtttaaatctgatgcggcattaaaagagctacgttcaccaaaaatcgatcactgtaatttaaacatctactatgaccaggatattattgaaatttatattaataatggtcaatatgttttatcaaatatcgtctatgaaatggcagatacgattaagagtaatactggttttgaaatctttactgactagaacttgttttaaacaggttcttttagtttaaaaataacttattatggcaaatattgctgatttaaaaccgttttatacttctgtgacccaatttattaaattttcagaaaaactcctcaaattcaacaaaatcagtcatttaaggtaggtatattattataatcatttcaatattttatgaagacaactttgattaaaaaattattctttttaccaaaataataaaagcgaattctcttgagaactcgcttttgcctttatctgctgggaattactattgcggcaataatataagcaataaagccactgcctcccatagcagagaaaataatccaacctaatcttaccaatgaaggatcaagatcaaagtattctgcaattccaccacatactccacaaaccatccgatcttgtcgtgatcgataaattcttttcatttcttacacctccatcttaattctaatacttccaacattacaatcagcttctattttacgttgaccgccactatgactatattcatcactcagtccgtcacttcgataacttccaatactaatatcaccaacatcactatcgacttcataactgtaatctgattcactacctaccattgttgcatcaatatctccagcatcgcagttaaattcacttcgataactattcaacaagttaatccgtgcatccccggcatcaacgtctactttagtatatgatgcaataatattttcggccttaaaacttccagcatccacatcaatttcaacatcattagccttcaaattaggaacaatcaattctccagcatctacttctaattcaaccttattaaattcatagctattcggtatataaattttaattctagttgttatatcggtaacatttataagatgccaaaatctaaaactatcctttacaatcaaagtgttttgttcttgatataatttaatttttttgctcacattttttgcttcaactttaattgtactaccttcatattcaattaattcaacagttccagcttctgcttgaatttccaaatttttaatgtctgtaaattcttctgttacatccatcgttttagtaataggtagactgattgtaaaatcacccttatcataaagagtttccagttctgaaaaaccaccaatcatcgtaccgctgatgaacaatacaattgcaagcaacaacgatcctaatgccacataccctatttttttcatcgccgatcacctaccctattaaatatattttgacaaaaatcaacgattcctctaataacagcagggattattttaatcaaacctttagctaaccagaaaaagacgaatgctaaagcaattaaagcacatcctgccgccatggtaatcaatcctgcgcctggatacgctgcaataatcataaatgctttgacaaagcagactatcgcaccaatcaaacaagcggctccaccacacaaaataccaactccaaggccaaatatagctccaaaaaaacctaatcctaaaccaagaatcccaccacctactggtaaagctagaaaaatagccccaataatgataaatattaataagattcgatttcggtcggaatttcctctaaaattattcttgtgacgtttattattttgataatcattattatcatcagcagctgtctcctcttcactaataattttagcatcaataatttcacgagattgtttataatttgaattatccatccctttttcactatactcaatatcctgatcaaactgattatctaaaccagctttaatgatcgctgcaacccgttcaggagagcctaaatcatttataacctgctgttcattttctggaccagcttcatcaaaataatcttcataatattgcatagcttcttctcgttcagcatcttcaatatcttgaagtaaaaatgctagttcttcaataaactttttacgattcataattatttccccccttcaataattttattgatcttacgcacatactcatgccattcccctttatacatctcaagttgagcttgtccttgtgacgttattttataataacgtcgatttctcccaccatactcttgatcatatgtttctaaacaattatcctttaataatcttcttaaaacaggatacaaggtcgattctgaaacatcaagagcaattctaacatcttgtgtaattttgtaaccataagttccctcggcctccttggaaactactgaaagaacaattgcatctagcaatgcagctcctgtattaaatatcataagcccagctcctttcatatttatctttcaataatattatattctatatagtattatctgtcaactaataatatataataattatatattataaaaaaagaaacatcatttgatgtttctcattagttacaggtatgtactccttccttaaatttctttaaagtttttgttatttctaacatacatatccaatatatgtataaataatttttcctctatcagtaatttcattgttctaaatgtctcatagctcaaataaaacgctataaccaacacgattcacctccaaaacatcgcattgattctcaattgcccaaacttttaataacgctatccaatatttatcacatcccaagcgattactataattaagctgcttgtatatgaagccatttgaaaattctggagaattttagattataacaaataaaagcactaatatcttatccattctcaaaatttaatttcactgcccatctgataatattccgcttatttaaaataagatgtatttcatcgtaactgaataattccttttcatgatttacaatcatcaaattttaaaattatgacattgcaattttcatcaacgttttcccataggctattaacataaataaaattttatcactttgttaattattgttttttttaagatatttttcacatattcatttttaataatattttcaaggaggtaataatgaagaaggttaaaaatatattgattggactattagtatttagcattattgcgttatgctttatctttaacggtcccttagttaccgaggcctctagtgatgatgaaaatagtcgtccctatacacaattaaaaaataccactagtgatccggaaactatttacagtgataaatatcaaaaaaatatttatcagcaaattaaaaagattaaacaaataaataattacacttttaacaatcccttgttaattgaaaatccttatggaacaaacaccacaggaatctatatgtattttacaactgattatcaatgcgttgcgacatataccatcagttgcgaaggatacgaagacttcaccagaacacttaatactaatagtttaagcggcttttctaaagaacatgaatatttgctaatcggatctattcccgatgctaaaaacactattactgttacattaacggataccaatggcaaacaagttgattctattacgtggagctatcaagcacctaaattatcaggcggtgatcaatatctcagcgttgcaactgaaagttatgatactacatcagcgctaagcaacggtttatacaccgttttaggtaatgatgtaaccgaagaaaatgatgaacagacctatatgcgattatatgataacgatggcgtgattagaagtgaaattcctatcatttcataccgcagtcatcgaattttattcgaagataatactatgtatttaagtgtttcaagcacaaagatcgtaggagttgatcaaactggttatgtttcgacaatttattctactggtgattacaaattgcatcatgactatattttcgacagtcaaaataacttaattgttttagccagtaaaaagaatgcggtaactagtgaagataaaatcattatgattgatcataatactaaagctatcacagaacttgttgatttaattgaactctttccagattactataaaactaccgccaagccagattctgcagatgatttagattggatgcatatcaactcacttgaactagttggaaaagatagtttgatcattagttcacgagaaacttcaacaattatgaagttagataatatttatagtaatccaacagttgactatatgatcggttctaataatttctggcaagaaagtggttacgatgatttacttttgactaagacaagtgacttttcattgcaggcaggacagcactgtgttacctatgttgaagatgccactcttgccagcggacaatattatttatatctatataataataatctagcagtcagtacaactcgcaacgattataattggaaagaagatgataattatcaaaatgtttcttacgatactaaaaacggtatttcttattattataaatatttaattgatgaaaataaccgtactgtttctttggttaatacaatccccgttgattactctggttatgtaagcagtgtccaagaacttgataacaatattattattgatagcggaatggcaatgtcatggggcgaatatgatcaatttggtactttgatcaaaaaattcacaacaaccgggggcaaattcgtttatcgtgtctttaaatatgattataatgactattggtttcaataacccaatagtcattttttaatctatgtatagatatttatcatatttaatatactaattaatttaaataaaaagagcctaagctctttttatttatttttctaatgcctgttttgctaatgctagagcaccacacacaccagcattatcacctaaagcaggtgatacaatataatcatcaatcttatccgttaaaatttcatctttttgaatatatccatttaagaattctcttaaatatttatgaattaatgggaacatttgtttttgttttgagaccccaccacctaagatgattttctttggtgaaataactaaaacataagttgctagagcctgaccgatatagtaagcttctaaatcccaagcaggatggtcagccggtaattcaaaaccttttttaccccaacgtgcttcaattgccggtcctgctgctaaaccttcaaaacacgtaccgtggaatgggcatttacctgcataagtatcgtcttcacgaacaatcatattcatgtgtcccatttctggatgtaataacccatgaactaaatttccttcaacaatagcaccacatccaattcctgtaccaattgtcatatacaaagcactgtctaaacctttggctgcaccaaaataagcttcacctaaagcagcaccattaacatcagtatcgaatcccataggaatatcataacgttcctttaaagcacccatgatattaaagttaccccatcctggttttggtgttgttgtaatatatccataagttggactgtttaaatctggatcgattggtccaaaacatccgactccaagtgcctcaatatcttttccatcaaaaaatttaaaaatattcgccattgtttcttctggagtttcagttgggaaagaatctctttctattacatttccaaattcatcaccaatacaaactacgaatttagttcctccagcttcaattgcacctaatttcatctattcttcctcctcatttttacatttccattatagcttaatttactatacaaatgaatagtttaagggcaaaaacagaaacttttgacaagatgtttcataagttttcgtaaaatcatcaaattcatgaaactacgtttcatctaaaaaaatatagatagtattaaactatctatatttatccgtatgtaataatttattagcgttatcaatacgctcttgatttggtgggttaattccgtctaattgataaggaatccctagttcttcccatttaaatactcctagtgtatgataaggtaaaacttccactttcttaacattattcaaagtactaataaatttatctaattctgttaaatattcatctttatcactgatacccggtactaaaacatgacgaatccaaacaggtttatttatcgtacttaaatattttgccatatctaaaatattatcattaccttttcctgttaactcttgatgctgtgtactatcaatatgtttaaggtctactaataataaatctgtatatttcattaattcattaaatttagaaaaaaacggttcttctctagtaaaattaccaccactagtatcaatacaagtattgattccttcttttttcgctaatttaaataattcaattaaaaaatcaatttgtaataatggttcaccaccactaactgtaattccaccatcatttccccaatagctcttgtatttaagtgctttagcaattgcttcttgaggtgtcatttccattgtcgacttagcattagcccaagtatctggattatgacagaatttacagcgtaacgggcatccatgtagaaagattatatagcgtattcccggaccatcaactgaaccgaaactttcaatagaatgtacaaaacccttgattgctgtttccatgttaatctcctttttcattaaaacagcctcttttaattaagaggctgttgttatgcttatttttcaataactattacatagatttatggcaagttcttgaaataacatccatttgttgttcacgagttaaatcaatgaatttaactgcatatccagatacacggattgtgaagtttgcatattcttctttttctggatgttccatagcatcaattaatttttcagttccaaatacgtttacatttaagtgatgagcaccttgtgcaaagtatccatccattacttgaactaaattagttttacgttcttcttcatcatgacctaaagtatcagggctgattgtttgagtattagaaataccatctaatgcccattcgtatggtaatttagcaacagaatttaatgaagctaataaaccagattgttctgcaccgtaagaagggttagcacctggtgataatggttcaccagctttacgtccatcaggtaatgaaccagtagctttaccataaacaacattagaagtaattgttaagatagaagtagttggttctgaatcacggtaagtgtgatgttttttaagtttatttaagaattcttttaataaccatactgcaatatcatcagcacgatcatcatcgttaccataacgagggaagtctccttcaatttcgtaatcaattgcaataccatcttcatcacgaactgttttaactttcgcatatttaattgcacttaatgaatctactacatgagagaatccagcaataccagttgcaaatgtacgtcttacatctgtatcaattaaagccatttcagctgcttcataataatatttatcatgcatatattggattaagttaagtgtatttacataaatatcagctaaccattccatcatttggtcatatctttccattacttcttcgtaatctaaatattcagaagtgattggacgatattttggagctacttgagtttttgttttttcatcgataccaccattgatagcgtataataaacatttagctaagttagcacgagctccgaagaattgcatttctttaccagtttgagttgcagatacacaacagcaaattgaataatcatcaccccatacaggacgcattacatcatcattttcatattgtactgagctagtatcaattgaaatcttagctgcatattttttgaaattttctggtaatgcagcagtatataatactgttaagtttggttctggtgaaggccccatgttttctaatgtgtgtaagaaacggaaatcatttttagtaaccatagaacgtccgtcagttccaagtcctgcaacttctagtgtagcccatactgggtcaccagagaataattggttgtaagaaggaatacgagcgaatttaaccattctacatttcattactaaatgatcaattaattcttgagcttcagcttctgtgataattccagcttctaaatctctttcaagatagatgtctaagaatgttgatacacgtccaactgacatagcagcaccattttgagttttgatagcagctaaatatccgaaatataaccattgaactgcttctttagcatttttagctggttcagaaatatcgaaaccataagcttcagccattttcttcataccatttaatgctttaatttgttcagctaattcttcacgttgacggatagtatcatctctcattgatccacttccgcaatgtgctaaatcattttgtttttcttcaattaagaaatcaataccatataaagcaacacgacgataatcaccaacgatacgtccacgtccataagtatctggtaaacctgtgatgattttattacgacgagctaatctgatttctggtgtatatacatcgaaaactccttggttatgagttttatgatattctgtaaagattcttcctaattcaggatctggtgtatatccataagtttcacaagcttgttgtgccatcttgataccaccataaggcataaatgctctttttaaaggtttatcagtttgtaaccctacaactgcttctaaatctttaagttcttcgtcaatatatccagcaccataagcagttaatccagaaaccacatgagtttccatatctaatactccacctttagcgcgttcttctttttgaagttcttgtaatttaccccataatttatctgtagcttcagtaggtccagccaagaatgattcatcaccatcatatggcttgtagttattttggatgaagtcacgtacgttcacttcctctttccaaagtctacctttaaagccattccattgatctttttctaacatgtttctttcttcctccttgaaatttaataactgttagttaagtttcttacttaagttttaaataataatctgatggatttgcaagggatgtcatcaagactaatattctactactatcgtaatgcacttacataataagaataacacacactatattttggaaaataactttattttcctttgttatccacgactgcattatattataaattgtttttataattcaagtcatttgcaccaaaaaaacaaattattttcaacaaattttaatcattttttaagatataatgaaacagttgttttgttagcgcttacaaatacttttttttaacttttaaagatttttattaataaatttaaaataaacgaatatattatattaccacgattttattatctatttaataaaataaaaatatttttacattaaaaattaaatctattaaatagtagatttttttttcaatttattatatagtaatatctagttgttaggagggtacaaaatggatttaacattcaacaccaatactgattttgatcaaacaaaagtactaattactaatatcattaaaaatactgctgatgactatgatttatttctttcagaaaattcaatcaataatctctcagtacatttaaccattgcaattatccggatcaaatcaaataattatattcccatgagtaacagtcaaatcgcttcatataaacaagatcatagttatccatatgcaaaaatgttatgcgaccgtttagcacgtgaatttgaaattgattttcctgaagctgagatttcattggtttccatgtatctatcaaaaaatcaaaaattagatttagaaataaattctggttttgatttacttgacgatcaagtttttaagattttaagagaaacaatgtatacaatttatcaagactatcataaagactttagaaatgatgataaattattcgttgctatcggtttacatttagaaccagctttagaacgtcttgcaaatggtcaacttgttgaaaatcctttaaaagaaaaaataatcgaacgtcatcaagaggaatttaattatagtaagattttaaatgatgttgttagacatgatttaaatctatcattcgatgatgatgaattagcttttatcgcattacattttgttgttgctaataatcgcatcgatgaataaaataaatatctaaataaaaatatcttcatttcgttgtgcttagtcagttttctaactaaacagtaataaatgaagatattttttatttatttaaaataaccaactcacttattcgtgttatgaattattatttttaaccaatttacatcccgcactagttccaattcttgtagctcctgcagctacaactttttccatgtcttcaattgtccgcactccaccagatgcctttacttctaaatcatctccaacagtttgtttcatcaaagaaacagcttcaggtgtagcccctcctgttgaaaaaccagtcgatgttttaacaaatgttgcttgagcttccttagctaatttacatactgtaacaatttcttcatcggtaagaagacaggtttcaataatcacttttacacatttacccgcagcagcatcaacaactgccttaatgtcattaaagactagatcggtattcccatcttttagtgctccaatgttaataaccatatcaatttcatcagcaccattagcaatagcatcctttgtttcaaacgctttaacggcacttgtattagctcctaaaggaaatccaatcacagtacatactttaacatcactatcagctagagcttgagcgcaataagctacccaggttggattaacacatactgaagcaaagttatactcttttgcttcatcaataattttagcaaccattgctttagttgcatcagcttttaatacagtgtggtcaatcattttattataattcatcttcatcttctcctttataatatattctttcaagtgcctctttaacaatttggctatcaccaggataatctacttgtcctacatcgagtgaaatgaacttttcatgtcccttaccaagaatcaaaatgatgtcatctttacaagctatctcgattgcctgttcaattgcaatttgacgtgactcgataattacactattaatatcgacaatttctttttgaatcgttttacaaatttcataaacatcttcaccacgatcatccaattgtgtcaaaataacatgatctaagtatcgattcgctaattgcccaagttccttacgtaatttgtaattacgcttcccaggagcccctaaaaccgcaataattcgcccatacccttgtcgaactccatcaacatattcaaaaatagcttcataattactaatgtgttgacaataatcaataataactgcaaactgttgttctgtttgaatcagttccattcgcccttcgatcggttttacattttcaactgcatcaatgaccatcttatcatcacatcccatagcaatcaacacaccggttaaagccaagacattataaatattgaacattgcgattactggggaattaacatgaaaagtatttcctttaaatgaaatatcaaactcactatgatctaaatgtaattgaatatttttagccataatatcactttcaatttcaattccgtaagtcaaaatgcgtccttgggtattattttttaaagtcataaaatttaaatcatcactatttaaaatcgcccatcccgtcggtttaatcatttcaaataatttttgtttagctaaaacatattgttcctttgttccatggaaatctaaatgttcagccccaatattagtcattacagcaatattaaaattaatcccgtcaacacgtcctaaagccaaaccatgacttgatgcctccattgcaacaactttgaccccagctctattcatttcaaacaattttcgttgcaaatacagagcttctggagtggtataaggacattcctctttacggccattatattctaatgaaatcgttcctatatatccactactacaatattttgccatagcatctttaatcattgaagcaactaccgtcttaccactgctgccagtaactccgataattttcattttattacttggacaatcataaaaaagatttgaaacacgattaagttctactaaagtattctcaacccgaaaataaataatcttatcatggtaataattaagatctttggaatgaacgattacttttgcaccctgaaaaacagcatcttcaacataacgatgtccatcaacacttaaaccttcaatgcaaaagaaaatcgaataaggttttacatatcttgaatcactatgaattgaatagattttcatatcgttgtcagtatcaaacaattcatttaagcgtttcattaaacaacccttccttccaaaatttcatcatatttatcaattttgatcgttacgatctcaccaattaaattatcagctgttttaactttaacttttaaataatcaccagcatgaccaattaaatattctccatctcttttttcaaataaaacttttaaagtttttccgatctgttttaaagcaaactcatgatttagctctttcgataactgcaataaacgattagctcgttcatgcttaatttgatcatttacctgatctttcattttagctgctggcgtattttttcgtggtgaatatggaaaaacatgtaattcactataattaacttgtttaataaagttatatgtttcttcaaactcctcgtccgtttctccaggaaaaccaactattacatctgtcgtaaaagcaatatttggtaaataactgcgaatcttattaattttttctaaatattcagctgttgtatatttacgattcatccgcttcaaagtagcatcacttccagcttgtaaaggaacatgtaaatgatctacgataatctcatttgagccgattaaatcaataatttcatcactaatttgacttgtttcaatcgatgagattcttaatcgctttaagcctttgatcttcactaaatctactagcagttcataaaaactatagtcatctagatcctcaccataaccagctgtatgaattccagttaagacaatttcaacatatccattgtcaactagcctttgggcttggtttaacacactttctttttgtcttgaacgcactcttcctctagcataaggaataatacaataagtacaaaaattattacatccatcttgaatttttaaaaatgcccgtgtatttttaaatcgatcaatatttagatcttcaaacttccttagattcattacattatcaactttaatgaccatttctccagtttccaaatgctcatcaacatatttgactatatcactacggtattgagttccaagaacaacaccaacaccttcgattttttcaatttcctccggggctgtctgactataacacccaactacacaaatagtcgctttagggttcttgcgaattgccttgcgaatcatttgacgtgatttactatcacccgtatttgtaactgtacaagtattgataacataaacatcagcaacttgtttaaagtcaacttcttgatatcctgcttcattaaaaatcttcaacattgcgttggattcatatgtatttactttacatcctaatgtatgaaatgctactgtcttcatttactcaccttttttaatttctttattaattttttgtaggtcttatcaccaacaaatttattctcatataaaaactctaatatttcttcatcatcctgactattagctaatttaaccattgcttccttaatcaaattaagattagggtattcttttgtatatcgatcaattaaattaatttcatttgcaatacgataattttgtccattaaattgatataccgttttaaaatcatcatgataaaaataataactttcatcatcttgaccaaccagctgcaacgatgaaaattgtgaattgtatggttgtattccatataattcaataactttatctattgttttagcataactatttaaataaacttgatgttgttttagtgttactaattgataatcattagcataatatctgtttataaacggttctaaataaggaatataaattatttctccactttgatgatcttgaaaacttgggaaattattaattatcttttcttcatcatgattaaacatttttcttttttcttcataattcacatattcaaaaatatcataattagctgccataaatttattataacactcatcaatcgctatttttgtcctaattccatttaaaataacttcatatgcaaataaatcttccggtgtctttagtttataattaaagccttctcctgccagctctttattaccaccagtcacaaaattatataatcctgtcttatttaattttatttcataacgatatttatttaataaatccaatatactcattatccaatctccctagcataaccaattacacttaaaaaatataatggagctgtttcacttctcaaaattctttttcctagtgaacaagctttaattcctaatttattcatcatctcaatttcatcaagttcaaagccgccttcacttccaactacaatagtaattttatcacctgaagataattggtctaatgtttgttttagcaccatatgttcaccttgtttagcaagttcttcaaaagctactagattatgatcacctaaatattgatcaagctgttctagtttgattacattagtaatttctggaataaaattacgccatgactgttctgcagcctcttttaatatttttcgataacgagtgatttttttagcaaacttttgctcatccatctttactacacaacgctttgtttgaattggaacaatacgcttgacaccaagttctgtagctttttgtaatactaattcaaatttatcccctttgggtagagcataaactaaagttatctcgacatctaattcattattttcttcaagccgcttatcaattttaactaaacctatctcaatatcttcaattacgccataatatacttgtccagcattatctatacagataatttcatcaccatttatatttcgcattacctttttaacatgatgcaaatcatcatccggtaaaattagttgttgtttacttgttaaatcttcatttataaaatatcgttgcataatagacctccgctaacattctaacacgaattatcgacagagaaaagcaataaacgacatcactttttttacttttttcttctatttttatcagtattaatttagtaaattaaaaagttgatttccataagcaaaatgtagtgaactgaataagttggaccacaacttattcagttcactacaaatatcacctttttaaattgttattgtcccctattacaatttcacaacttgttaaaactcgatagtcactcgctacctattcacataactctggaattatttgtggtttggcatttttaccagttatttctgtttctttagcagaaatttttatcattgcattcttttccgtcataaatgatgacctactgtttcattcgttactttagataataatttaactgtctgagtgtggagttaccctttgccatctaatgatatcatagctctcttatcactccctcccaataaaaaaaccaaatataattttgcctaaaaacacaaaaatatatctggtcttacctcctcaaagcaacaatccttctatggtataaatataacacggaaatgaatattatcaatatttttagtgaaaccattaataaaaatataatccaatttcagtaaaatttcaaattaattttccaaatttttctacgattttatccaaaaaattatttccataatcataaaacttttgatgtttgtaagttcttttagaaaaagacttaccatactcatgatttaaacaataaccaaaatatattacactagaaattaaataaattgaaatcagcatgattactaagctggcaagcggcccatacaaagcattatatcgtgtataatgattgacaatatagaaaaagaatactccaattaaaacaatgcatgcactagtaaaagcagctccaatcaagccatatgataatggttttttttcaaatgataaatatcgataaaaacagtaaaatacaataaataaaccagccaacataacaattgtgctgttaattggtactaaataattaaataatgttaatcctactaaaccaattactaacaaaacaaaaactacgatagctttaattcgcactaaaatcgcataagtatcaaaaccttcatcagtcattgaaatcaacataaaagaataaaaagcattactcgctaaataaatagaaaatcccattgaaataatcaatgatacaaatgttgtatattcttgtgacattacatactcaacaaaaggtgctaaaattgtttcaggaacataatcatatagtaaattaattaaattaggcgcacttaaaatatccgtttgaaaaacctttaaaaaaataatcagtgccggcaataaagctaacaaaacacaaaaacttaacgaataacgaaacaagtttccctggggcgaaataaatttcattacaactctttgaaatctttccataatccaccatccctctttattgttaactatatcacaaaaatgcatacaaaaaaatagttaaaggtgttcaaagaacacctttaacttattgaatcgctaatttaaaatcatcatcaaagtcaactaatacatgacttccatttttaatatcacctttaatcatttcacgagcaaccaatgtttcgattcgtgactgaataaaacgttttagtggtcgtgcaccaaatgttacatcataaccttgttcactaattacagctttagctctatcacttactgtaatagtgatctttttatcacttaaacgatcagatagttgtttaataaatttatcaataattttattaacaaccgcttgatctaatgagttaaaataaacaatctcatcaatacgatttaagaattctggtttgaaatgtgctttcaattcattatcaaccgctgctcttgtatcactattattaccttctaataagtaatttgaaccgatatttgaagtcataatgataatcgtatttttaaagctgactagatttcctttagagtcagtaattcgaccatcatctaacacttgcaacaagatattaaatacttcgggatgtgctttttcaatttcatccaataaaacaatactataaggatgacgacgcacagcttctgttaattgtccaccttcttcatatccaacatatcctggtggcgctccaactaaacgagaaacactgaatttttccatgtattctgacatatcaattctaactatatttcgctctgtatcaaataattgctcagctaatgacttagctacttctgttttaccaactccagttggacctaagaataggaaacttccaattggacgattttcatcattgattcctgctcttgatcttaaaattgcatcactaactttttcaattgcttcatcttgaccgattacccgtacctttaacgcagtatctaactttaataatttttcacgttcagattccattaatttattcattggaattcctgtccagcgagcaattacttcgctaactgtatctacagtgaccttttcttgtaataagtcatcttcttttttagaagcttcaaattctttaatttctttttcgatttgtggtaatgtttgatatttgattcttgatgcttcttccaaattaccctctgtctgatatttatccgttaaagcttctaatcttactttttggtcttttaattctttaatatgatccaatgatttcttttcttcttgccatttgtcagttaaaccttttacttgttcgtctaaagaagcaatccgacttttaatctcatttaaacgtttttcattatcttcatttttgtcttctttttcaattgaaattcgttccatttctaatcgatttttctcacgtgttataacatctaactcttctggtaatgaatctatttccatacgaatagaagcacaagcttcatcgattagatcaattgctttatcaggtaagaaacggtcagttatatatcgttgtgacatattaacagcaccaataattgcactatcagtaatttgtactccatgatgtgattcaaatgaatctttcaaaccacgaagaatggcaattgtatcatcttgatctggttcatcaacttgaactttttggaaacgtctttcaagggcagcatctttttcaatatacatccgatattcatctaatgttgttgctccaatacaatgcaactcaccacgagccaacattggctttaataagtttgcagcatccattgccccatcagttttaccagcaccaactaattggtggatttcatcgataaataagataatatctccttcagccttcttaatttcatttaaaacggctttcaatctttcttcaaattcaccacgatatttagctcctgcaactagtgctcctagatctaattcatatagtgttttattttgcagagaaactggcacgtcatttttaaagatacgccaagctaatccttcaactattgctgttttacccacaccaggttcaccaattaaaattgggttattttttgtttttcgtgataagatctgaatcacacgacgaatttcttcatctcgcccaataactggatcaagttttccatcggcaacatcttttgttaaatcacgtccatatttttccaatacttcgtattggttttcaggattttgattatcgaccatatttccacctcgcatttcatcaataattttctttacatttttcttatttaaattataaccatttaatatttcttttaaccagctactatttaattcaaataatgccataattaaatgttctacacttagatattcatctttaaaattatgcatttgcttatccgctaaactaagcagttgattcaaatcatatgagattcgaatactatttatatccacattacttacaatcggcttaccttgcaaccttacgttcaatttattttgtagatcggcaatattgacatttgccttacttaagactcgatataatatacctgcattgtcttccagcaaagctaatagaaaatgctctacatcaactacttgatgacccatttcactagccattgttattgctttttgaattgcttcttgcatcttggcagtccatttttcaatattcatgtctatcactcctttagcactctatatccctaagtgctaattatattatacatctctttttagcactgtcaaggttaaagtgctaaaaaattaaaatatttatttttaaatctacttctgtctagatgtaaaaaactagggtttgtcaccctagtttaatctaatatccaattattatttaccaaaatatctgtttaacaatccttcaaacgcttttccatgacgtgcttcatcacgtgccatttcatgcactgtatcatgaattgcatctaagtttaatgctttagctttcttagctaattctgttttacccatagttgctccattttcagcttcaacacgcatctctaggttcttttttgttgaatcagttactacttctcctaataattctgcaaattttgctgcatgttcagcttcttcataagctgctttttcccaatataatccaatttctggatatccttcacgatgtgcaactcttgccattgctaaatacattcctacttctgagcattctccttcaaagtttgctcttaattcttttttgatctcttcatctacgtctttagcaacacctacaacgtgttctgctgcccaagtcatttcacctgtttgttcaacgaacttgtcagccccaactttacatactggacattgttctggagctgcatctccttcataaacatatccacatacagaacatacaaatttagccattataattatctcctttttatattatttatttcatcatcacctataattaacagtaatgattactgatattaatatatcatattttaattttttgtcaatatatatactcacctaaatagaaaaaaagctgaatttttattcagccttcttctaaaagagagagagaaatatatcgctattaacaattttcttttttacggtatagccataatccagcaatacttaacattcctaatactaagaatgatccaataactacatcgtcaccagtttttgaactagttgttgtatctgatgcagtgtttccattaattataccatcttcattaggggtaactgatggttttatttctaatgcatcaattgctgcttgcaacttagcctgtagtttatccacatcagtttgtagcatttctgaactatcttttaactctactttgatagttttaataatatccaataatttattataagattcttcagtatatctattagcatcaagtgcttcagcagtttctaataaaatattaagatctgttaaatctcctcgttctacaagtttttcagcagcagctttcaaagtttttgttaattcagctatatcttcactgctgttttcatcatttaaagcatctttaacttctgttagtactttaacaaattctttccatgtagaagcagtataattattttctttataactatcaattaatccatttatagcattaatttcatcagcagttgcttttaaaaccaatgccgcacgtgtttcttgtaatgctgttaaagcatcttccaattgtttaactgtcgcatcatcactagcaattaggtcatgtgccacctttaatgcatctacaaatggtgttgcagtagatgttagatatttactagtatctaaattatccaactcatttgtatctatataattttgtaatacttctttactcactgaaacttttgtaattaagtttgatttagctacttgtaatatgttgaccatatcagcaacttctttaacgttcaattcttcttcacctttagctaataaagtattagcctcattaactttatcttgtaatgcctcccatgttgaatcagtataatcatcagcaactaatgcaccaattttatttaattcatctttaattaattgggcattaccacgagtaactaaattagtataagcaatttgtaattcactatatgctttgattattaatttcttatctcctgaagcagttgataaaacttcatttgcctgattcaatttgctaacatacttagcataagaagacgcagtataattattttcatcaacatttaatgagttaacatatttttgtaatgcttctaattctggtaaaaattcatcatcatttaatcttacaatttcagaaattgttgggatattatttgcttcccatacaatcttcaattcataagtcatatcaaatggtaaatatatctcatttagtgatttgcttaaagtgcctacttgtacccactgtttttcttcaccaaccattactaaagccattaccttagcattacttactgtccctttttgaacgatatttattttcttaacatctaaattatcagaaagtgtatatgtaatataccctgcatcagtagtatttggtttatatgctgtagttaaatcaccgtcaaacatattttgtggtacaaatccttgtacttccactgcatttgattcaaaagtaggatcatttgataccggaacatactcaccatcattaattacaatttcattgaataaaactgcacgattattatttgttgctgtcattaaaatttttaaataacgagccttaacattatcagcagtcccttcaaccaataccttattaggataagtacttgatgctttataacctgcatcagaatttatacaagtaacagaggcatcatttttattttctactccatcaccaattgttataacctttgtccaattttctaaatcattagaaataagaatatcagcatcccgaatataatttactgcagaatcttggcagaacatttgaattttagaaatatttctttcttgtcctaaatcataaataatgtattgtcctttttgtggcagatctgcaaattctgttgttgtatcaatattaccatcaaaagccgcaccattattacgactatcttctgctactccccatgaactattaattcccattgttgtttcatataatgaaggagcgtataattcatttgaatgtacttcaaatctattaagattaaaagtaatggcagaatcagtattattaattattcttacataacgagcatcaggtaattcactagttttagtttttacagtagtccactcaagtgcatttttagatgtttctatagtcaaattatctttattcatatcaacaacaatttcactaatatctttaattcttaataaatcaacaccaatatattgaccttgagttaatgtgattacctcatcatacatcaatttagttaaatcttctttactttctgttatcaatctatattctgtatttgtgtatacatttgtatcatcataatctttaataggatcaaattgagcaacatcaaattctgagaaaattacccaagaatttttctgttcattatttactaaacgaacatatcttgcctctactccacgtaaattctcatcaataacatctttgccgttagtaacaccttcatatgatttatatgttgtccaatcttgaccatcagcagagtattgtaaactgtatttaagccacttgtcacccgcattacgatctccaccaataacagcatgaacttttcctatctgaattgtttttccaaaatcccaaccaataaaatcaccaacgcggctagtatcaccaggcttagtattaaaatctaaagctgtagtgttatctccatccgttagatttgactctgttcctttgtagacttcccatgtatcagtatacataaatgtcttttctatagctgcaggattgcttacactaaaatcataaactttccaccaaaaaccagcactatcattttgtaaatttaattctaaatttctaattctaactgctttaaccgttaagtttaatgctgaaacatcctcattaactgctgcttgaccatcatattttgcaatttcttgccaatttttaccatcaattgtatattcaagcgcatattttgtaattttatcagttttactatcttgaacaaaattaattgttcctaattttttaggatttttgaatgttaaaatcaatgaggcatcaataggtatataatctttaattgtgccacctttatacggatcttcagcaaagtgagcaaatgtagagttatctccatctgttacttttgcaagagtaccgccttgtaatgacaatttatctatagataatgttcccatatcattatctacaataggttcatctgttggatttacaacaatatcacgaattcctaaccaagtattagatttcgcttctgtggcaatcattctaattccttttacattttgtaattctaaatcttctaaaacaacttcatttggtagattataaatagttccatccaaatctttccattctttgccatcattagtaaattgtactttagattttgcaaaagtatctttagaattactatttgtacctaatctaaatatcactttatctacatcaatagcttttgtgtaactaacaccaacatatgtaccttcatttatagaatttggatttttataaacaatttccgtattggctttattatcaaaaacatttgaaatagctccagtaggtgtatcatcacgatttgtaataaattttgttacctgttttgatggatcaataattgatgatgcaacatcagataagtattgttccattgtttttataaacggtacaatatgttgtacccctacttccgcatattcatcatgatcaacataatggaaattatgtgtttttgatctttcaaaagcagcttgaccttgagcatacaagtcccaaatttggtcattttcagcaccatcttgcactgctttgacaccattaattaaagcaatcgctgcctcagtagtatcatcccagcaatctaaccaataaattatttgatcttttatacgagtgtcacctgcttcattacgataagtttttgcagctgtttgtaattttgtgaactcgttaattaaatcggtaaataaatcatcactgattgtattaccactatttaaagcagttttaaattgattcaaacgatcttttaattctactgactcttgtaatggcgttacacgactatccatattttgatttatcatatgttttgatagttcttttaaggcatccgaagcagctgttacttctgcgctattatgatcaacatatttgaatgaatcttcccaaatttcatctgcttcttcactagtttcccaaatattccatgaataacatgcatttccaaaaattgccactttacttggttcagattgttgcattggatttagaacaataccttggatcttatttggatcaacccccggatgtaagaatgtactatatccacccataatcaagtgctttttagaattatcagtacaaggccaattgatccacatatatggtccacgacctacattattagtaaaagttgttgtaaaattatttgaaacttcaccccaaacacgtccaccagtcataacaatttgaacgttttctgggaaattcgtatagtaaccttggccattacccatatattcttgagtacaaaatggtaatgttaattttaaatctggatatgttttttgcatttccttgatccatgcagtcatatctttcaaagttttaatgtagttatctccaccaacatttccagcatcatcagcaagaattgcaatttgacgaacacctgcttcaattacttgagcaaatttagcctgcattacttttaaatcagcttgataattttcttcactgttatatctaattgcattattcatatacggatgcaatgcaaaaacaaaacgacattttgattcattaccagcttgtgctaacggttttatttttgtttcaatttcttcatcactgtataattcacgccatttagaattatgtttagggtcatcttttggagcataaaaatatgaatttaatttataataccctccccatttcatcaattcagagcgatcttctgttgaccaagggtttccataatatccttcaatgaatcctcgactagctacatcagcgtaatcttccattacaaagttacggattgaataactatccatctggttaaagatatgatataaactagtgattccataaaatgcagcatcagtatctttacctaatacagtaattgtcccattatctgaggctaataaatatgaatctaatttatcatataatccacttgtttttaatgtgtaatttttagatacatgtttatcaacgtatccatctgatcctttaatacctactaagatattagtttgatcttctttaatttcatttgagatagtagcatttatcttcttgattgccaatacctcattcattctagctttagtatattcatcaataccatcttcatatacaatattaatattttgatgaataacgtaatcaccactttgatattccatcaaatgtggtttaggataaatttcataatctgactcagcagcactaacttgtgttggccatgcactaaaacaaccgaaaaccattagtactgccaaaaacatagacatcagtttatgagtattttttttaatttttctcattatctccttttcctttcccgtatagttaatatcgagtcccattcccaaaaattatcaatattagttatacattatataaataaatcaatacagattttaaacaaaaataaagaccaaatataattatgctaaaaaacataatacatatttggtcttgcctgcttagagtaacaatccgtatttacaagtaaatattagcaaaatatttagtaaacgtcaagcgcttccattataattttgcgttcttttttatatgtatacataaataagtttgctcgtctggtgataattcataatcataacgatcacgaattaatttaacaatccgattaatacacaaagacaatcgtaaatcttctttcaacatttcccggatatccgctgtagtatcttgcaattcatcaatttcatccctaaaaattctttccgctaaatactttaaatgagttgaaattcgcgcataacctagagaatcctcctctaagtcaactttcattgataatttaatcacatttagtacttcttttgtcaaagtaacaattttcgttgcattatttgccttattatcgagtgaaaagtttactaaatgtaaagcaatataacctgcttcgtcgtcatctaaccgtatccccgttttttcttctatataatcaagtgcccataaaccaactttatattcttttttatataatacttttgtttcactcaaaacaacattaggaagataaatctcttccttttttctttttactgcaaatgaaatatgatcacttattgctaaaaatatttcaccactaaaatctgtatctaattccttattagcttgattaacaattttattagttatttcaaaatatatagcaggtactgtttcaatcgattgctcaaatcgtttctgctgatcatctttaaaaaaatatgtcttttcaatcctgctttcgtcaacttcatcaccaattctcttttgaaaaccgatccccgaaccagttaaaattatatcacctaactcatctgatattgctgcaacactattattattaaaaaccttgagtatcttcaatgttattgcctccatccatttacattaatatgtcattcatggcatcgacaataaattgtacttcggtgcctatgataatttgtaaattattttttccaatttttataattcctgttgctccagtagctaatatagcttgttcatcaactaaatcaggattacctaattccacacgtaatcgtgtaatacagctatctgcaaactgcacattatttcgcccccccaaagcttctatcaaaacaattgcaatctcatcatagtcttgattttctaatgtaatattgtattcctcttcctcaatttcaattatatcttcatcagtctcccgaccaggtgtcattaaattataacgaactatcatgaatctaaaaatgcaataatatataaaagcacaaatcaatccaagtggaatcagcataaatatatcgttagagaacggggctttaatactcaaaatataatcaatcaatcctgccgaaaagccaaagcccgcaagccatttaaataccgcagccacaaatagcattattcctgttaatagagcatgaataaaatataatactggtgcaacaaacataaaagagaactccaatggttctgtaaccccagtaacaaatgaagcaaaagcagcagacaataaaatcgttccaacttgtttttttcgttcaggtctagcactttggtaaatagcgattgcagctgctggtaatccaaacatcattactggaaaaaaaccagcctgatacataccagttactcctttaatgcctccagacactgttccccaaaatttgccaatatcattaattcctgccacatcaaaccaaaagacagaattgagtgcatgatgtaatccagtaggaattaataatcgattaaaaaatccatataatccagctccaactggtcctaatttcgaaatcatttctccaaatgatacaaaacattcataaaaaaacggccaaacaattagtaataataaagaaataactagcattgaagcagtcgatattattgggacaaaacgctttccaccaaaaaaagataacgcatcaggtaactttactttcgaaaactttttataattatatgccactacaagacctgaaattattccaacaaatgcatttgcagaattttcaaaagcagcagaaacttctgcttcgggaattccttttatcaatgctacagccggtggtgaaagcagcctagaaacaatcatataagaaacaaccgcacttagagctaccgttaactctcgttcctgagacattccaatagcaattcctacagcaaataaaattggtaaattatcaataatcgctcccccagattcaatcaaaaaagcagcaatagcattattacttccccatcctgttgggtcgatccaataaccaattccctttaataatgcagcaattggcatcactgatacaggcaacatcaatgattttcccaatctttgcatgtatttcatcattcccatccccccaatcaatataggatttaactgtacattttcgttcggacaaaaaaacacattaatttactaataatcaatgtgtttagaaacataaatatattgaatggaaaggtactatttttcgtgcagaataatatatccaaacctattgtatcactaaagcgcttactttgtgttaaaaaaaatacaacgaactaagttcgcactatgtaagaaattataccttttattatcaaatcatgtcaatagatatatctgtggctatatacattaaatcataactacatattatcattttataaaataattggtataatataagaatatttaaagatattcttgacatataattatttagtcgatattataaatataacgatgttactattaaattaggcattagtgattattttttgatatcactaatgcctttttctatatttaaaaggagataatgaatgaattcttttactagactattaaaaaataaaaaaaatacagtatgtgctcctgcctgtggcaaagttattcgtctggaaaatatccccgacaaagcatttgctaacaaaatggtcggtgatggtcttgcaattgaaattaccgataataaacttgttgcaccatgtgagggaataattagtgttattgctaatactaaacacgcatttgttatgacccttcctaatggtcttcatttactagtacatattggtatcaatagagcaaagccagatgctaataattttcagtatcatgtaaaagccggtgactatgtttctttaggagcagatattgttacactaagcgataatttattaaaagtcctaaataataaggttattacccctattattgtttgcaactatgaatctcaccctattaaaacatttactactgcttcatctgttgaaactggtaaaaccatttttacttataaatgattgagtctaaattaaatgaagccccttatttggataaccaaataaggggcctcatttcaaaaattaggctcgttttttatttacagtataaaaagcgaaatttaaatttcgctttttaacatctattaaattattcctctttttttcttaacagccagtatataccaacaatagcaacaacgcctaatcctgttacataggcaaaaatatttacatcatcacctgttttcgcagaatcactagcaggaagttcgtttggagtcggtgttggtattggggctactgttgctttttcttctaatttagcaaccgctgtttcaaaattgtttttagcctcaataaattctttagcagaaatatcacttaagttatcaagcatagcttttaaaacattatatgcctcttgatatattttagcagaactgtcagtgtatttgcttaaatccactaatgtaatactgttaatatattcttttacttcatcagctttagcacgaactacaagagctttaagtgcattatcaagtgctttgacactagcatcaatttcttcagcagttccattttctaatcttgcagttgcttcagcaattgcatcagctaatcctttgtaactgctagttgtatataattcttgattaactttattagctgtatctaaaatatcttttagatcaccaacaactactaatttttctttagcagcagctaattcactaatagctttcgcaaattcatcagggtgtacaggagtgctttgattatctataatcaactgttcaacttttgccttagcttctagatacattttccatgagttgattgtgtaaagtttttctggatttgtaaccgaagctacaaaatcattttctccttcaattgtaataattgcttcttcttgatttgaaggattaaatactaaattagtatttgctagatcataattagcaattaatttatcaacatctgcaactgaagtattatcaccattagcaattgccttattaattgcctcaatagctttactatatgctaaccatgaagccgcagtgtaattattttgatcagtatgtgcattagcgataattatttccaatttacttaaatcaccttttaatactttattttcaattgccttattaattgctctaacggcattatcaacagttgtttgtgaagcatactcactttcaagtacttgcttacctgcattataagcatctccatatgttgcagctgctgcagctgtccatgaagacaaatcttccttgttatcaattaaagctttaagcgcatcaacattaagtgtagtgacctcagatttatatgttgataattctgtaatattaggaatcacatcaccccactcaaccttaatatctaataagattgtattttcaggtaaaacaaattcattaattgcttgtgataatgttcctaaagttacccattgttctgcacttgcatttgtaaataatcttgctttaacaactgcattagaaattacagcactattttgaataattttaattgtgtttacttggttattagatgataaactatagttcacataaccattagcatctttaggaataaacattgttgaaatatccccatcaaccatataactaaataatccatctcttgtttcttgactactagatgtaaaggttggattgttttgtgaaggtataaattccccattatttatttctaattcttggaatctaacccatttatcagctccaactttagttctagtaatttcaaattttaaataacgagcttgcagatttaaaccatctactttttttgcattatatgaaatttcatgacttggtaaaacaaaaccaatttcatcagtattttcagcttcacctgggttattttcattttgattacctaaaagcatgatttctgtccaagtttcaccatcagtagaaactgagaactttccatgacgtggataatcccattcgctatcagtacatatagctttaaatgaatttaaagttatttcttgacctaaatcatatgtgaaatacttgccaacattttgtgatccctgataagcagtagccgtagtaagatcaccatcaaatacattcaatggtttatcgattgaaaaattactacttgtaattgatttctctttaatctcaactgtatttacaataaatttattaagatcaaaagttacttcagcctcattattattaataatacgaacataacgagcatcagcacttacattaccagcatttacgttttgccactcataactatttttagaaacttgaatggtcaaactatcatttgttaattcactaacaatatcttttaattcatgaattcgatctagttttaaacctacataatcaccattagctaaagtaatccctttagctggcgtgattttagcactttcatctaaataatcagcagttaaactcttatattcactaacattagtaaatactttaccattatgatataccttagctgctacatcaaattcacgcatagcaatccaagtgttttgattaaccttattaaccaatcggacatattgagcagtaatattttgatctgacaaatcagtcacaatattaattgtatttttatatgtttcaactgttgtccaagttttaccatctaatgaatattgtaaatcagcatctttaaaataatcaccatcgctatcagtgttaccttgaagaatattaatcttacctaaagtaattggtttagataatttaacccctacataatcacctggaatagttgtatttgcaggttcccctttttgtctaacattataatgtactttagtagttaaatcaccatcaataagattagcatcactaccaccataaatactccatccatccgtagtacggatcacttctttagtaaattgttcctcttctgccggttgtgtaacaacagtaaattcacgcattgccggccatttgtttccgccaccaacttcgctacatacataacgtacggcaacaacatcttcaatttcaatattagtaacatctacttgtgatgcatattcaccatatacttctttatttaaatctttaaaagttgttccatcagtagaatattgtaattttgcataaccaaaagtatcttcttttttatcactattattagcaccatttaaaatatgaacaccataaatagtcgttggtttacttagatccacttggaaatattgaccagctttttcatatccattatgccatgctgcagtatcattattaccatcaacaatatcagctattttacctgaatgccaagtagtaaagcttgatgaagcactaatttctaatggttgttctgtttctccactagcaatatagtcattaattggtcctgaaagtttatcttgtaaagcttttgccaaaggaatcaaatgtgttgatccaggactaactttagctgttccatttaataatttacggatatgattttgactattaattaattctgatgatgcatttgagaattgattaaaagctgtaaccatatcattttcttcaattgcaattgctgattctgtaaaatgtttaattgctgtcgttaaatcttttaaagaaccggtaaaagataataattcttttttcaggttttcatttttactatttgcatggaaaccatcacaagcatcaataatcacattcatttctgcaattaattgttttccactttcaataattgaatcaccattagctaacttagttttaaactcattaattaatggttgtaattcttcagattcagctaaaactaagccatgaccattaggttgaggattagacatatgcttagctaatgtatgtaattcctcacttgcctcttgatcaatatatttaaatgaatcagcccaactttgatcatcattaaagcttttaacattccatgcataatcagctaccgcaaaaatagccactttagaagcttcagcttcttgcattggattagttactaccccacttaaatcatcaatattaatatcagtgtgtaataaacttcctttccccatcattaaacgtgaaccgttaatatcattgacaggccagttcaaccagaacagtggacttcttctttcgtcagccccttctggtaatctgtttcttttaaaatgatctaatgttttttgttcaactggttgacacactgcttcaccagtccagaaaattttcacatcttcagggaatccagcatcataatcacttaattcagaataatccccttgccatgaatgattatatcctgctggacagaaaacagaatcataaatatctcctttttcttttgcccaagctgatacactattcatcattttaattacaacactacggtctaggctaccaacatcatcaccaagaacaccaaattggcgtaccccagcatcgtacaattgatcaaactttttaagtaatgaagcaatttcttcatctactttagatgcattgaaaccacccataaatggatgggctgtccatacaaatctacatttagaatcatttcctacttgaaccatttccttaatggctgcgagttcctcttcaggatataattcacgccataaatttttatgatatggatcatctttaggtgcaaatacataagaagtcattttgaaatcaccaccgaatttcattaatgacattctatcttcatttgaccaaggaatcccatagtacccttcgataaaaccacgaatatcggtatcagcataatctttaattacaaagttacggattgttgatccatccatttgattaaaaatatgttttaatgaggtaattccataaaatgccccatcagtatcttttcctaaaataacaatttcaccattatttgaagcaacaaaatgcgccccaaatttactaaatagactctcttcaacgctatagttggatttaacatagccatcaacataccctccagatttatatgtaccaactaaaatatttgtttttccgtctactttctgcttagatgtgctaatttgtttattttttgactctaatacttcagtcattctctttttagtagcagcatcaattccatcttcatataccacattaacttgtgaacgaataacataatccttatcttgataagtaatttcatgtggtgttggataaatttcataatttgtttctttagcttctacttttatatttggtgacataaaaaatagtgtactaaatacaaccaacattgctaatgaagattttaaagctttgtcccaaaatcttgccatcttttttcctccctaagatttagtcaaatggattagaaaaataaaagaccgatatacagaaaataatctgtacatcggtcttgcctaatctaatagtaacaatccatttacttcacgagtatatcatgacaattatcccctgtcaagaaagcgattacaaaaaatggatttatcaagcatcttttgatttaaccagaacgattggtttactatttgtgatagttgcaatttcacaacttacttgattggatacacataatggatcctgtcgttgtaaaaaatactgattcaatgggtactcagcaccatcaatatcaatataagcatcatctagtgcatataatgaaaaatacttatattcatcttgatacaccttatgtgttcccggcaataataattgaataacattttgctgatcaataattctaatttttttatctgcatatttttccaaaagacacataacgctaagaaaatgatctaagcgaccgcccgtcacaccataaatatctacttcatcataaccattctccaaagcatattctaaagctgcatgtgtatcggtcacatctttacgagttggcaatctttctatatctaactcacttaaaacattctcgttttcaatcgaatcaaaatcaccaattgcaaagacaggcttaatcccctgtttaagtaatatttcaacaccatgatcaacaccaatatattttaaactgtcatcgagtttacaagccagtgcactacaaatacctatcttcattttagtgactctattgctttcgtataatcatcactaccaaaaacatagctgccagccactaaaacgtcaactccagcatcattacataacttggaagtcgattcattgattcctccatctacttcaattaaataatgataattattttcttttctgagtgttgccagctgtgcaattttatcaacagctgccgaattaaatttttgcccaccaaaaccgggctcaactgacattactaaaacaacatctaactcattcaaaaatggttttagtacttctactggtgtatccggcttaattgatagcccgacctccacatcatgctccttaatatgagcgattaattcattaatcttatcttcagcaactgcttcataatgaaaaacaattaatgacgcattactattaataaaattatccacatatttagctggatcagtaatcattaaatgtacatcaagatacatatccgttactttactaacatcttttaaaatactatatccaaatgatatgtttggaacaaaatgtccatccattacatcataatgaatccaatctgccgctttgattgcgttaatctcttctttcaaataagcaaaattagctgataataatgaaggtgctactttaaccatacttccgttcctctttcttttttacatcttgtaaattcattaaataatgctcatagcgttctttagatatttttccatcttcaacggctttttttaccccacaattaggttcactatcgtgtaaacatcctctaaacttgcattcatgactaaattgagcaaaatcatgataggctacagctagttcttccggtgtcatttccaattctaatgaagaaaaaccaggtgtatctccaagatatccaccatacatcttgagcagttcaacatgacgagttgtatgttttcctcgcccaagagattttgatatctcatttgtttccaattttaaattaatatctaaggcattcaaaaaactacttttgcctaccccactttgtccagtaatcactgatactttatctttaaagactgtttttaattcctcaagcccatgattatcttttgagcttatttcatatacccgatatccagcctgacgataatctttaacatattgtttaacgctttcatcttcatctaaatccattttagaaataataataattggttcaattcctaaatgctcaattactaaaagaaatttatctaataatattgatgaaaaatcaggttccttacaagaactaacaatcagagcttgatcaacattacaaataggtggtcgaactaaacaattatgacgaggcaatacattcattacatagccatcattatcaccttcgacttcatattcaacaaagtcaccaaccaggggcttaatctcatccttacgaaatttccccctagcacgacattgaattatttgatgatcatcttcgacataataaaaccctgctaatgctttaataattcttccttgtgacatctctacctcctaatcatctgtaggtatttcaggtttataattataataataaagtgtaatagattcattcttcttagttaccgtagtaaaggcatctaaactttgacggactacttgatttacagtaatcttttcaatttcatttggatctgtaggtgttggcaatgtttcccgtttaactgaaaaacctttatttgttagtaaggtcgcagcagcatcaatatccattcctttaacatttggtacttcaattttaattcccgaagaaacagtcaatgtaattgtccgatctttttcatcaggatcaaccttatgcccttcttttaaactctgttcaacaactgttccaactgcttgttctgaactagtttctttgatcgtaacatcaaacccaagttttgtcagtgcttctttggccttattttgatccattcctacataattaccaagaactacataatcaccttttgatactgttaaaataattttacgatctttttcagttggatctactttagttcctttttcaatactttgatcaattacagttcctttagttttagaagatatctcatattcaatctctacttcaaatttcaatttttctaatgcctttttagcaacatcttctttttttccagtgtaatcttcaagaacaatatatttgcctttcgatactgttactttaacgacatcaccttctttgatcgtcgttccttttttagggtctgttgcaatgatttcacctttttcatattcatcagatagttcttcagtaatatcatcgctaatagtaacattatattcttttaaaatttcttttgcttgttcaactgttttttctgttaaatcaggcattagactagtatctggcttcactccaagataaatcgcaaaagcaattcccgcgataactaaagcagtaaccacaccaactcccaccttagcttttgtatctaaacctttaaatttattaactaatttactgaaaaaaccttcttttttaggggctgccacttctttttcttcaactggatctacgattggtgcagtattgccactagtaaatgcggaacgaggatcaataacaattgttggatcagtatcttggtcatgtgaaaaaactaatttttcttcatcctgacgctccatacaagtctttatatcatccaacatttctgttgcacttttataacgatcattaagatttttagcagtagctttaattacaatattctcaacagactggggaattgaaggattaaactccaacaatgatggtagatcttcctgcatatgctttaatgcaatattaactggtgattcaccattaaatggtacttctccccgtaacaactcataaaaaacaattcctaaagcatatacgtcactttgggcagtcgctttttcaccacgtgctaattctggagctaaataatgcaatgagcccataataacatctgtctgggttacctgcgctagagattgcattgaagcaattccaaaatcggcaattttagccactccactatcagtaaccaaaatattttgcggttttaaatcacgatggataatccctagctgatgagctttagaaattccactaattacttgtttcataatatcaattgcttcaactacatgaacagcaccacgctttaaaatcaactcttttaacgtcatacctggcacatattccatgacaatataatatttatcttcatcctcaccaacatcatatatttcaacaatatttttatgagaaagtgcagctgctgcactagcttcacgttgaaatctagttacatatattggatctttagcaaggctagttcgaagaatcttaatcgcaatagtacgatttaagataatatcttgagctaaataaacatctgccattccgccttgaccaattagttctaacaattcataacgttctgcaattatttttgccatcctatttttcctcccgattatcaatgatagctactccgatattatcacgtccaccattttcattagctcgatcaattaattcagtaactttttgagatacttttatattcttttttaaaatttctttaattatttcatcatttaagcaattatataatccatcactgcaaagcaacaataaactatctgcaaattctaattcgataaaagatggggttaattcagtatctgcaccaattgcctgagtcaaaacatttttttggctatgattaacagcttcttcttcactgattgctccacgatcaactaaagcattaactaaagtatgatctttagtcaattgcattaattgatcatttttcaaaacataagcacggctatcaccgacatgagaaatatatatcacattatccattaaaattgccacgacaattgtcgtacccataccatgatgctcaacattttgcttagccattctttttacaatcgcatcagcttcataaattgtttcatttacccattttttcaactcatcaacattatcaaatggggggatactgtcaaaacaattaacaaattgatccatcaccacccgagaagcaatttcaccagcacgatgaccacccataccatcacagacaattgcaataacttgatcttttacatttgcaataacagtagcctgatcctgatttttatttcgtactttaccgatatcagtcaatgcataatagttcattatttcaccccacttcttttagcccttaattgtccacaagcaccatcaatatcgcgcccatgttcttttcttaaagttacattaatatgtaatcttaatagctcatttttaaatatttctactgtttctttatcactaggttgataaccatgctcatcaacactattatatggtattaaattaacatatgcatttaatccacgtagatagtgtgccaattgacgagcgtaaacaatatcatcattaacaccttttaacatgatatattcaaaagtaacacgccgatttgttttatcaatatattcactgatagcttcacgtaaatcatccattggatgcaccttattgatcggcatcaattcatcgcgaatttcatcattagcagcatgtaacgaaattgccaaattagtttgaattccttcttcactatatcgcttgatccctttgatcaatccacaagttgaaatagtaatgtgtcgagcgccgatagctagaccatgtggatggttaatgatccgtacaaattccatcacattatcataattatcaaatggttcacccgtccccattacgactacatgactaactcgttgatcaatatcttgttgtactttaataatttgtgcaacaatttcacctggtgttaaatcacgttgtttgcgtaataaaccactagcacaaaatgtacatttcatgttgcagccaatttggctagttacacatagtgacttaccatagtcatgaatcattaagacagattcaatcaaacttccatctaataattcgaacagatatttaattgtcccatctcttgctacttgtttttctttaatttttaaaacatctaaagaaaattctactttcaattgatttcgtagatcttttgataaatccgacatatcatcaaaactacgagcatctttctggtaaagccagctaaaaacttgtttagcacggaatggcttttgtttgattgaagcaaaatattcagttagttgttctagtgaataatcataaatatttttcatcttattttcctttttctaatttacacatataaaatccatcactgtcataaacatacggtaaaatcttcttttcttcaattatcttcatatctggatatttatcaagaaattgttttatcatttgttcattttcttttttattgattgtacacgtactatagaccattttaccatttttcttcaataaatagtaggcattgtctaacaattttgcttgtaaaggaatgattgtatccattgcaccagaatcatgatatttaatctccggtttacgtttcattactcctaaaccgctgcaaggtgcatcaagcaaaattttatcaaatgattcttctgaatatttttctttcaacaaagtggcatccccaacatgcagttctacattattaacacctaagcgttttagattagcttcaactagcttgattttatgttcaaataaatcatatgcaattattttaccctgattattcataatagctgctaaatgtgtagttttacttcctggagcacaacacatatcaagaacgagatccgttggctgaggatccagcaacggagcaatcaactgacttgactcgtcttgaatagtgactaacccgtttttaaaataatcagtgttagcaatatttcctgctctgtacaagagtccatcgggagaaagattccctgcttcaaaattttcatcagttaataattgagcctttgtagtctttaaaatattgaccctcgctgctctggttggtggtgtattatcatgctgacaaatctttttggctatatttaaatcatactgtttacttaacatcttaactatccataagggatggcttgtttcaatagaaattcttttcaattcatccttctcatcaatctcacattttccattacgtaaaaaatttcttaaaatagcattaacaaatttccccgcaaaattatcacgtttctttgctaaacggacagcttcatcaattacagcataatccggaaccttatctaagaaaattaattgatacaatgacatcaataaaatcattttctcacgatttttaatttttttcccttgaatatatggcgccaattgatattcaagatataacttattttgaatcgttccatatacaattcgtgtagccaaatctttatcatttctagataataagcttttttctaaatagtcatttaaagtaatatttaaataactttgctcattttggtattttattaatacatctaatgcagtcgttcttgccataaatagtccttcctatatttgattatatggattaaagtcacaaaccacatgaactttatttccttttttattataaaaatcactcatcttttctaatactggatataattgtttactatttgtaaatttaatcataatacgtttacgataaatatcctgcatccgatagatcaaactatttgccggaccaagaattgccattttatcaagttgtttttgtaaatactcttttatttgcaccgcactttgattaacaacttcttcatcttttccttgtattaaaatgctcactaaatgaacatatggagggtaagctgctaattttcgtgttttcatttcttcctgataaaaacgaagatagtcgtgattcttgacacattgtaacacaaaatgctcaggattgtatgtctgaatcattactgtaccttctttttgaccacgtccacttcgtcctgaaacctgttcaagcagttgaaaagttcgctcattagcacgaaaatcagggatatttaaacttatatcagcatttaaaacaccaacaaaagtaacattttcaaaatctaatccttttgctatcatctgtgttcctaatagaatattaccctctttgcgagcaaacttatctaataatttttgatgcccatccttttgtttagttgtatcaacgtcataacgaatcacttttgcaccatcaaatatagtctccagctgttcctctactttttgtgttcctgttccaactaattttaatcgttcacttgaacaatgtggacaaagacgcggcatttcaatttgatgttcacaataatgacaacgtaatttgtgatccgccttatgatatgttaaggttacatcacaatgaggacatttaattacttcaccacaatcaaggcaacgaacatatgttgcataaccacgtttatttaatagaagaattacttgttcatcatgatccaggcaggtttgaatttgttccttcatcgcttttgaaaaaagtgaataatttttatttctaatttcatcagccatatcgatcaattcaatctttggtaagggaaactgattgatccgctttggtagctcgtatagatcataaattcctttttgtcctcgactataagattctagtgacggtgtagcactaccaagaataacgggacagttatggtattgcccccgaattcgagcaatctgagtcgtttgataccgtggcttgctttcctgtttataactaggatcatgttcttcatctaaaataatcaatcctattttttccaaaggcgcaaataccgcacttcgagcaccaacaacgatcttaacttcactattcaaaattcgccgatactcatcataacgctcaccagcagataattttgaatgtaaaattgctacctctttcccaaatttgtgtttaaaagcattgaccatcatcggtgttaaagaaatctccggtactaacattaagacagttttattatttctaatcacatatttagataaatgtagatacacttcggtttttccagaaccagtcacaccatgaattaaagcagtatgataagtatcaattttgctcatgattccattgactactttttgttgatcaacagttaaagaaaactcatgttcctctttttgatcatctaaataagggtcacgatataattcctgttcgattattaccgttaccctctgttcaattaacttgtcaagcagtccacggctataaggaaatgcttttagtggcgtgtcgggatgtgtttttaaatattgatacgcttcttgttgtttaacagttttaagagtagcatcttcattaataactttaattactttttgatacttaattccaacacttttatttgtacttggttttaattgaggtggcaacattgcttgaagacagctaattcgtggtgacaaagttaattttgctaatgtcaaagacagctcttgtaattcttgatttaataaggggcgctcatcaataacttcactaatatagcgatatttaaatcctgctgctgtttctaattcctcttttgttgaattgctataacgacatcccgttacatatccgattattcgttgatatccaaacgcaattgtcactctaaccccactagcaatttcagtatttgctaaataatcaaaagtagtgtcaagagcatgggttggatgttctactaatacttgtacaatatacaccatcatcatctccaatttgtttctattctaccacatctacaagataaaataaaagagtcgattaactcttatatctttatagcaaagtatctaattgctctcccacgttttttatttttggatgatctatcatcttaccacaaacatctgttctagcgaaaaattagcgagtaacaccgctggtaataaagtgcaaattaaactagcctgatgacactaaaagcttttattgatgattcatcaagatagatattaagatcatgtttcaacacataatcatgataaccatcaaaaacagttgcatgagttaatacatacttcattgcattcactctcttttaaaaaaaggaatctttgcgattcctagacacgataaatataattatcttttcgcggtttagcttctggtttcggttctttaccataacctaaaatacaattaccgattcctacatacttttcatcaatgccccactgctttaacaattcttttccctcagtactcataaaaacttctttggcacgatgaatccagcaagaatctacgccaactgcattggctgcatttaaaagattccccattactaacgcaccatcttctaaatatgttccaatcgttgaatcccctaaaacgactaccactgttggcgctccataaaaaggatcgttttcactatccattattgccgcattcaattttgatagccgcttaattatctcaggattttgaataactaccataattgcagattggcgtcccattcctgaggctgcatatgttccagccgtcaaaatttcattcaattgttcttcgctaatttgctctttttggaagcttcgaacacttcgacgtgtaattaaattattgattgtttcattcattatactatccccctttttataaggatattatatcacagacttaatgaatattaagatatagataattgtttttaagaaaaatactctatataatttagataaaaggagggctgtttatgtgtaaaaaactatcaataattttactatgcctgcttatgataacaggatgctctaaagacaagccaattttatatagcaatcttggtaatcaagccagtcaaaataaacttactaatattttaaatgaagctgacctccccaaagagaatattaaacaattcttttcctatgttaatacctttaatcagcacgctacacccttaattggtgattttgaaactttagaaagagaacaaccagattaccaatattttaaatataatagcccagttgaaataagtgatcaaaacgattctaattcactaattccttcatttatcttaataaaaaacctaatttatactaataatagcggtcacgcagatgactcatatattatgtttaatttaaatttaattgatactattgatcagtattcaatgagccaagaagatcgtttaaaattcattactacttttaacagcatttctgttaccggcataaaaaataatgaaatttctcatatcaatcaaattgaaaaaacatttagtgatcgtgactttagcgtaaaacaaaaccaaaaagcatcattgattaccttgtggcttcactcttccgcagataaccgtcgctttgttagccactgtggtgttttaattgatagcaatgacggtttatattttattgaaaaatacggttgtttttatccttatcaggtgacaaaatttaatagccgaagtgaattaaaaacgtatttattaactcgaaacgatctcaaaggagatgaaaatgacggtttgccactcgtttttgaaaataataaatatctgaataaataattaataatatcctttgaataaattgtaatacatttttatattagttcctagatgcagaaccacgactttaatccaacagtatgatttcggtgctgaagcactgaccatggcataatctaatttgaatttccgagcataatgatctgcctttcgtaaatgccagctatttgtaacaactagagcatttttcaatccatttatctgcattatatcgcggctatacatcaaattatgatatgtacttcgagattgtccctcgataaggatatcttctttttttacccctaaactaattgcatatgaagccattattttcgcttcctgatattcatttttaactgccccaccagataagattaaaaatttaatcttatcttttttatataaagtaacacccatttcaacccgtgatttcataattgttgatggctcaccatcgatattagcaggataaccacaaataatcgcacaatcatattttttataacgctgttttttatatggttttttaaatactaataaaaatgctagtagattcaatattccaaatccaattattactcgtttgaccattttattacctcattattttacatttcccgggaaattgtaacaaaagggcctaatggccccgatgtttcgctttacgtttttgctgtttcaatacaaatagatgctctttttcagccgttcgctgctcacgacgaataattttattctttgccttattttgctcatattgtcgtttcaacgcttgcatcgatttagtacctgtttgtaagttcatagattgttttctaatcatccgttgtaatcgcttaggattttttggtttatctttatgtttcgctttgaactcagcaacaaaattaagtttatggtaattatttaaaaaataaacatatatctcaccatcacttggctcttgaccgaacacaactcgttcaacgtaacacttatctccatttgttaaataaaatactccaatccaaaacggatcatcaaataaaacatttaattccaaaccaacatccaacatatcgctatcctccttgaaatttacttctaagaacggacaacctcaggagggcaggttactgatgcaaaatgcacaacttgactaccaacaagttcgtgtttttatcttagcaaccatattataacttatttttcagatttatttaagaggaaagctattcctgctaaccctaaacctaatgcgattataataaataaattaatacttacatcattattcaaataaaaatatacttttaaatcatcatatagtcccatcaaaactgcaataattaataaaaaagctagtaaaaatggcacttttagccgtccatcattttttttcataaaatcaaacactttagcatcaaatactttaaatgcatctaacaacatgtatattcccaaaatagctaataacacaataatgtcggttgggcaaaaaattaaatcaagccctaatttaccttctaacccttgcgccaaatataaaattaaaaccattcctggataaaaaatatacgcaaacaccttaaaatactctttaaacttttccatttttcctcctactaaaaatcagggatatttacccctgatttgtttgatgattttttataatttcagcaattttatcttttgctgccataacgtcatcattttccactacatatttatattcatctttagtcgcaatttcttttcttgcttttgataaacgttgttggacaatctcttcttcctctgtacgacgtccacgaattcgtcgttcgagttcttctaagctaggtggtactaaaaagattgttgttgcatctggacatttttccattacttgaagggccccttgaacttcaatttctaaaacaacatttttaccttcatttaataattgatcaacgtaatctttgggtgttccgtaataattaccgacaaactgcgcccactctaataactttccttcttcaattttacttttaaattcttcttcttcaacaaaaaaataatcaattccatctctttcatttggacgtggttttcttgttgtcatcgaaatcgaataagcaagatttaaactatcgtctttgaataattcttctcttactgttcctttaccaacgccactaggcccactaagaattatcaacattcctttttgcactgtctacaccccttttttttgataagttcatcatacaaaatacgtcttatattgtcaattgttttcaaactatataatgtcaattatttttaatctatgttatacttacaacggtgataaaaaatggcatatgatggaataatgatgcatcaagtaattgatgacttaaacaaaacaataactggtggtagaatcaacaaaatctaccaaatctcaaaatatgaattattgattcaagttcgtaataatcgaactaattacaagctgctgctctcctgccatccaatgtacgcaagaattcagctgactaatttagactatcctactccggaaagtccgaatcctttaacaatgttatttcgtaaacatcttgagggtggttatatcaaaaaaattgaacaaatcgaattagatcgaatttgtcattttctttttggctgtcataacgaatttggtgattacgttgaataccattgttatattgaaattatgggtaaacattctaatattattctttgcaatcaagataaaaaaattcttgattgtttaaaacgaattacccctaacattaatagtgaacgttttgtacaaccaggggcaatgtaccaattgccaccaatgaatcaaaataaagttgatcctttcactagtgattttattgaaaacaataatctaacaaaaatatatcaagggatgtctccaatactatctaaagaaattctttatcgtcatgataatggtatagattttaaagagattatggatgaaataaaaaatagcgataccctttatataagtagagttgatgaaaaagaatattttcatttaattccattaactcatctaaatcagcaggcacagtcttattcattattcgatggtctggataaacattttaatttaatcgatcaaaaagaacgtataaaacaacaaacatcaaatcttttgaaatttattaataatgaatatcaaaaaaatgttactaaacttgcaaaattagaatcaactctagaagattcgaacaatagtgatgaatatcgaatcattggcgatcttttatactcaaacttacatttattaaaaaaaggaatgcgtcatgttgaactagataattactatgatggttctaagattatggttgatttagatgaaaaacttgatcctaaaagtaatgctcaaaaatattataacaagtatcaaaaggcaaaaaattcaatcaatgttctgcatgagcagattgatttaaccaaaaaagaaattgaatattttgacagtcttttaacactaatggataatgcttcatactatgatgccctagaaataaaagaagaattagaaaatctaggatatttaaaaaagaaaaagaaaactaatacgatccgtaaaaataaaaaaccttcttttgagacatattatactaaagatggtattgaaatatgtattgggaagaataaccttcaaaatgattatctaacttttaaacatgctcatcgctatgatacctggtttcatgttaaagatatgcctggtagtcatgttgtcgttaaaggtgatcaattagatgaatatacgattcgattagctagtaatatcgctgcctattattcaaaagggaaaaacagtagtagtgttcctgtcaattatactttaataaaaacattgaaaaagcctcatggcgctaaacctgggcaagtaatcttagataattataaaactatttatattgatcctgatcaacattgcctcgatgaattacaaaaaaaatagatgcctgggcatctatcttttttagcggttacatccacatccgcttcctccgttattagcgttgttatacattccattaataacagagtcacctgtgttattagctgcgttaaatcctgtacctgctccgttaaatggagtagcgttagcagcacttgcgaatggatttccattactttgagtcatgaaagtacgttcataacgtggataataacgtgggtaataaacgatattattaatatggcgacattcgattgggcaaataattggttgttcaacatattgattagagcagcttgtacaaacttttcttggtgcaacgattggagtagcacggcagcagttcattccactgttacatcctccacatccgcagctgttgttacaaccacatcctgagttacaaaacatcatttccacctcctttaatatactatatgttcgattaaatttggtgctaaggcaaattacacagaaaggtctaaattatgaaattaatcaaatggaatactgttgaaaacattgaagcatatacaattactaaagaattaggcgatatgtcttataataacgaggacaaacaattgattctcaataatcgtaaacaattagccaaacttttaaaaactgatttagagcacatggtggcaccacatcaaacacactcagccaactttaaagaagtatctcttaaagacggtggcagaggtatgtactgccaagatgatgcctttaacaatactgatgctctttatacaaaagatactgatctctttttattatcatttcatgcagattgtaccccagtgttactatattgtcctaaaacaaaaataattgctgcaattcattctggttggctaggaacaactaaacaaattgtttcaaaagtcacaaaacatctaattgaaaatgaacattgtgatcctaaagagatgcttgcctatattggaccatgcatctgccaagattgtcttgaggtaatggataatgtcatcgacttagttaaacaaatggatttcgatactactccgtactataaacaaacagatactacacattatttgcttgataacaaaggtctaaaccgacaaatgttattaaatttaggtttattgaaaaaaaatattactgtttcgccatattgcactgttgaaaatgacaagttattttatagctatcgtaaatataaagatagtggcagaaatatcacaatcataaaaagacaagcttaaaggactataacaaataaagattttcaatctttgatatgttcccttctagatgacaagtttttattattttatttgtctacctaggaggaagcatatcactctaggcgttatagccctttttatttattaaatcagttttttctactttaattgttaatatttattttttagtaattaaattttccataaaattacataaattggttataaatcagttacaaaatcacattttaactacattaacttatctttttacttgttaatttttttatatgtttctcgatgaatgatataataaaagtaatatatataaacgataattgaggtgattttgtcgatgaatgaaaattttaattcagcattctacaagaagattcttgatcaaattaactctaatatctatgtcaccgatgttgaaactgatgaaattgtatatatgaacgattatatgaaaaatacgtttcaagtctctaacactgaaggaaagaaatgctggcagattttacaatctggaatgaacaaaagatgtgagttttgtaaaatcaaacaacttcaagaatctaattcacaaaaaatttgtgtatggtatgaaaagaacacgataacagaaaaaacatatttaaatcatgatactttagaactttgggataacaaactttatcatatccaaaattcgattgacgttactgaacaactacagttatctgtagaagcaacaattgatgaattaacaggtatttttaatcgaaatgccggtaaaaaacgaattgaagaactattaactgctgaatatcttaacgaagactttgttgtagttttatatgacatgaacggtttaaaatgggttaatgatacttatggacatcttgaaggcgatcgcctattaatatttgttgcccaaaatataaaaaagcgtttgaaagagccaaactttatctttcgccttagtggtgatgaatttataattgtttttttagatactactgttaaaggtgtagaagtttggatggataatattcttttaactttaaatcaagaaagaatcaaagaaaacattgattatgatacctcttttagttatggaattgctaatatccatgtagatgaaaatctaactgtttctgatgtattatctattgctgattcacaaatgtatatccaaaaacgagattatcatattcttatgaataaaaaaaggctaacaaattcacaacctaagtataattctattcctttatttgaatataatcgtgatcatctttttgaaagtttatcagaaacaattgatgactacttatttgttggaaatttaaagacaagtaaattcatgtactcacgtcagatgatgatagattttcgtttgccaaatcaaattcttgataatgctgcagcattttggggagaaaaaattcatcctgatgataaagcaggatttttaagaagtaatcaagaaattgctgatggcagagctgaacagcatacaatttattatcgtgcaaaagatgcctctaaccgttggattcccttgctttgtaaaggaaaaatgattagagataaaaatggtaatccagatttatttgctggaacaattcgtaatttagataaaaatagagaacaagcttctctagagccaaattctttagatacttatttagatacttcgtattatatttatgagaaaaatcaaagcaataaaaataattttctttttcaaaaaagcttttactttgtaaacatatttgatcagcaaaatgatttaaaaacaaaaactgacttacttgattttgtaaataaaaatattccgggaggaatactagctgtccaagcgcactctggctttccactctattgctttaatcaagccattttagaatatacccaatattcttatgaagaattatgtcaaataacaaatggaaaattttcaaatattatctatgaaaaagatcgtcaatttgttgaaagagaaattttccaacagcttgaaagaaatgacatttatgaaattcgttatcgcatagtttgccacggaggccatttgctttgggtatatgaaagaggaaaatacgttatcgatgggcatggtcaaaaactaattttgtctttttttgttgatatttcccatgaaatgaataatgaacaagaactacgtttcattaatgaaaatagccttgacggagtttttaaagctgcattaattgaacattttccaattttatatgctaatgacggatattatcgaatacatgggtataccaaaaaacaatttcaccatgatttaaatgattgtgctgaaaatctcatttatgaatcagataaagcaagaataagagcccaaataacggatttaattaaaaataatcagtcacaagctattcttgaatatcgaattaaaaaacgagacaattcaattgcctggattcatattagtgccagctttacttcgctgcttgatcaaacaattattatgattggaatggtcatggatattactaaacgaaaaaaactagaagataagttatatcgttcacagcagttgtttaaagttgcacaaactaaaaccggcttaaatatttgggagtttgatattcaaaacaaacaagtaattggcaatcccgattctgcagtaatccgcagctatcaaaatcttactgccaatatcccagaaagcataattgcacaagggttgatccatcctcaaagcattaatgaacttaagaatttatatcaacgcttagaaaaaggagctgctcccctttctgctacaatcagggtcaaacaaaaagatgcgaaagataaatatctttgggaaaaaataacatatactattgtccagcatattgatgaaaaaccagcatgggcaattggcatatcagaagatgttacagaacaaaaagaaattgagacaagaatctataatgaagaaagtttaaggaaagttttgaatgaagatattatattaaacatccgtttaaatttttctcgtgattttatcgaagatatttctttacattccaatgaacagtatgaaaaacagctctctgattacacatacgatgatatttataaatatttattacagactattgctaatgaggatgatcaaaaaaaatttgagaaaaaatattctaaaaatcaaattaatgactatatccgtacttttaccgatattccaacttttgaatttaggcagaaatatttaaatggaatgatattatgggtatccttaaatatgaaaacaaccatttctcctcaaaataacgatgtaatattatttatttataccaaaaatattgatatccaaaaaagacgtgaattagcattgcaaaataaagcagaaattgatgagatgagtagcttatataatgagtctacttcacagctaatgattgaaacattgctgaagaaagaatatgatcctaagaaagtcaatgcttttcttttgctagatattgataattttaaacagataaatcacagtgggaatttcttgttcggtgaccaaatcattcgtcaaatgggacaaatgatcaagaaaagtatttcttccagctgtattgcagcacgaatcaatggtgatacattctctattttttatcataatgctgaatcaaaaaaagttatctatcaagcagccttacaacttcaaaaaaagctttctagtatttatcattttcaagatattgagacccagttaactctcaccggtggtttaatctatctattttcagaaaatatgagctatagtcaaattcatcaatgcgcactccatgccttagatacagctaaaagacgcggaaaaaaccagatactatcttatcaagaaattgaaaaagttgaatttaatttcaagattgaaatgattattaaccctaatgattttacaattttatcgatgagcccgactggacaaatcatatttaattgtattttcccagttaaaaagccaataaaatgttatgaattattacataatcgtaaatcaccgtgcccattttgttctcaacaaatcgactttgaacaaacaaatatgcgtgaatgttttgtatccaaaatcgataaacttatgtatgttaaagaacagctgtctcattatgagggcgatactgtaagaaaaattgaaatgcaggatattccctttaacttagcatatgaaaatcaggattcagatttacaacaatttttagaaataagctggaaaaatatagataaaaatattcaacgagaaaatgcttttgataatattcttagacaattaggaacattctttaatgcccaaaatgttctcttatttcatcaaagcgataatcaacaaaaattttctctgacttcaaagtggaattataataatcaaatctctaatattaaaaatactcatttcagtaaggaacactttgaaaatattgttagtgctgtcgcaccacaaaaatactttgtaatattagataaaaaccatttttgttataaaaatattacagaactatattttgaaaaggatgtaccactaccattattatttatcggcatttataacaaaaacaagcttgtatcatgcttgctcgtggaaactgttaaacaacatattaacgcttcaaaatctattgaggtgattgctgatgttatttgtaaaattaccactatttataatttgcagactaaatatacttatgcccttactcatgatcaaaaaaccggtttatctaactacgattcttatattaagactataagaaatataaatactgatatttattctacttttggaatgattgaaataactatcattaatctaaaaaaatataatcagcggtatggcatcgtccaaggtgatgaaatcttacagttcatcgcacaaacaattactaaattttttgataaaaaatcatgttatcggatcagtaatgcccattttatagtgctttgtccagatattacgtatgaaaacttcattcatatatatgatactttttaccaagagctaattgaattttatgatcaatggatcatttgtgaaaaagtttgggaaaagaattcacttgtgttagaaacaatgcaagagcaattagaggaaaaaacaagacatgctgtaaataaaaaaatacactctaagttagctaaatctgatcagtcgatagcaaaaatattagagcgtttaaatactgcttttgtaaatggaaaatttttaacctttttacaacctaaggctcatactaaaactaatcaaatttgtggtgctgaagcattgatcagatacaacgatcctcaaaaaggaattattccaccagggcgttttcttccagaaatagaaagagcaggattaattagacatatagatttatttattctaaaagatgtctgccgaattctcagtaactggttaaaaactacttggaagcctttcccaatttcaataaattattctcgagcaactattttagaacctggtattttagaagaaactaataaaatcgttgaaagctataatattcctaaagaattaattgaaatagaagttactgaatccattggatcaattgattctgctagtttaaaaaatattgttaatcaatttttagctgaaggatataaaattgctttagatgacttcggtgctgaatatagcaatatttatatactatactcgctgcacttaagctcacttaaacttgatcgaaagatcgtaagcgatatttatcatgattaccgtgctaaattagtaatcaaaaatatcattaatacgtgtcaacaattagatataacttgtgtcgctgaaggagtagaaactaaagaacagctaaaagtgttaaaagatttatcttgtgatgttattcaaggctattatcttaataagcctttatctgaagatgatttcaaaaagatttctggcatcactaacccccattgacactaaaacaaagataatcctaagatagttttttagttctaaagcagctgagcataaaactaatttacgtgattatctttttttataaatgcatcatagttaaataccctgtatcaaaaatttctattttattgattttaatacattcttttatcttgcttaaatactaattataaaagtcatcactattgatgactttttcacatatatttttaaatctattaaaattaaatttagatttcaagttctaattattcattgataatttcatgcattacttgtggaatcaaatcaattaatttactaggtaatactgtataagaattatcccctattacatccccacagctgccatgtagataagttcctaaaatagctgcatttttaggtgtatagccttgtccaacaaaactaacgatcatcccagctaaaacatctcccattccagccgtagccatcgccttattagctgtaatattacgatatgtctctcgaccatctgtaattaatgtgttaggaccctttaaaacaacagtaacaccatattttcgagcaaaaccaccaactttatcaatcatatctaattcatcatcataagcacacaaacgcttaaattcaccaaaatgaggtgttaagataataggaacggggcactcttttaataaatctaaatgtttagctgcaatcgtcaaaccatcagcatcaattacgattggacaattggcatattgtaaagtatcaattacatactgctcgctttgttcatttaaccctaaacctgaaccaatcaaaattgcatcacggtcataaaaaagttcttgttccagtttactattacgaagtttagaagtacattcaggagtaactgttgctagcgcatcaattactttttcacttgaacaaacacatacaacaccacttccactataaaccgaggcttttgacgctaataaagcagctcctcgatagtaatcacatccagttaaatgtaaaatcttgccatagattcctttatgtccataataagcacgcggttttaaatgatatttgatccatgatggactaaccaatttagcaagcccctgctcctgacgtaaatctttagcatccaatatttcaactgcaatctctcctgtatacatatgacactcttcatttaaaaaagcctgtttgattgctgttaaagtaattgtcttactagcacaaatcacattaccataaggtattcctgtatcaggatttaatccggttggaatatcaattgcgatgatgtctatatcatataaattattaatttcttcaattaatatcctagctactccacgaacttcaccatttaatccgaaaccaaacattgcatcaattaccacatctgctttttgtgcatcacttataaataaagatatatcttcttcatccataaaagtaattggaacttccatctcttgcgcttgctcaatataaaaattatttgcttgagaaaatttattagggttcccaaaacagtataacttcacatttcgtgctcgaatatgtagtttaatccctaaacttaaaccatcagctccattatttcccggtccacaaacaatcacgatattattataacccaaacaatgcggtaaaatggcattactagctttatccactagttcttcgattgaatatccctcatttaataaagcctgatcgtaagccttcatttgtctacttgttgcaacatacatattatcaccattactttctctataaaatcttatgtttatattataaagcaattattcataaaaacctacttagaagcaaaaaaaataaaaaaagcagatttctacactctgcttctaggacgctcatccattatctcttgataaatcattgtaacaatattatgtggattaatattttggtctaacagacgttccagcatgatcatcatttttccatcattaatagtaccgataatattcgctttttcaatattttgaatatcacatatatatggaaaaaattcattgatttttgtattgattccataatgatgattagaacggctatataaataaattatcttatcaccattacaatcctcaaaaacacttccgcgaggataattaaaaacatttttatactgcttaacttgctttcttttttgttcatgcttatattttcgtttattttcatatactatttcaatatgttttggtgatagcatattaaccagctcataagattttttacaatcaaatataatcgtttcactgtaatcaaattcatatcgtaatgctgcttcacgaacaaacttagtcttattaacatataagtttgaattatctgtttgataaatataatataattgatcatccactataataatatcaccaacgcaataaataatcggaacatcaaaatgaatcaatccctctaggtagcgtgaattaacaatcagttttcgctcaatcattattaaattattaatttcaatccgattgtaaatatctcgaaaattagttcgcggaatcttataagtgtttgttaaatagacatatgtatttttacgatggtcatatatattcttatcaagcttaaatgtagctaaataacgggacttttgttttgtagaacaataatacccataaaaataattttcgtccttagcaacgaccaaatagggcctaattcgatgactttcttctatacgttctaactcatcattacttaacggcatcaaagcccatactagatttcctatcgccacttcattatatttatcttcaacaattggcgtaagatctataatttcctctttttctagtctactaaaatactttaataatcttttaaacaatttcatcttcccaccccaagataattatatacccaacaatcaaagaatacaaaaagattatagaagcattaatcctataatctttttgttactcattatataattgaaaaaacgaactgaagtgaggggtacagttcgttctttctatatttatatcttatttttcagcaattgttgcataattagcaacaatgtaatctacaactggattacttccccaagttttaatagctgaagctgttgcttgaatcgtatttgcagttactgttaatttataattagcatcatcatatccgtacttacctttttcggtagttgtaatttctttttttgttccattttcatcagttgttacaaccgtagtaacactcttatcagttacatctaatagtggatttaaagtaacgttatctaataataaagctgaactattaccgcctttgattgctcccatataataataagttccttcatattcaacccatttacctgcttgtgccgccaactctatatcatcagtatatttcacaacatttggcaatgccaataaagccgcattttgtgttaaaccattttcatcagtaaatgtattgcttaaagtttcatcaccgcgggtccatgactctgttaatgttgctttaacaactacatcaacattaccactgttttttactgttacatctttatttacttcaactcctggtaaccaatcagttggtggagtaaattcttcttcaattgtagtatcatattttgctgttttaaattcatttgtttttgtcaattcctgactaaaatacgctaacgacccaactactcctactgttaatgctaataataatattccacctaaactttttttatttttcattcttcttcacctttccttttctttattgttgttcagcaatcgtagcaaaatgatcggctaaatacacagccatcacattatcaccaaacgcatccctaattgctgcttttgaagcttggactgtccgcgcttcaactgtcaaagtataatctgcgctatcatatccatattttccgtattgatattttttagttacagttgtagtcccttgttcatctgcttcaacgactgtatgactgccgctaactgttgcatctaataacggattcatcttcacactatttaataatccatttgatgcctcatcttcaccaattacacctaaatagtagtaataatcaccataatgaatccatttattatgataatctgctagattatctttaacatcttcatattcataaaccatattttgaacaaaatttttaattgccgcatcatgtgaaatgccgttttcatcaacgaatgaatttggtaaaatttcaccttcctcgctcaagattttatctggatcattaggatccatcagattttcactacgtttccatagctcagttaattttgctcttaccacaatatcaacgtttccagtatttttaactgtaacttttttattaatttcaacacctggtgcccacttatcagttggaataaattcttcttcgatcgttgtatcatactttgccgtcttaagtctattttcaacagttaagtctctagaaaagtaagccaatgtacctacaaccaatacaattgcagctaatgaaataagggcagataggcttttcttatttttcatttctatcactcactttctttttaatctaataatgcatacgtttcaggaactacagtttcaaaagcggttcctgcgactgcttgtttattagcttgataaacttgaactgtaatcgttaaagtatagttggcactagcatacttaccattaccagttacaactgttttattgtaagttgcattattgggaatgcctgtatttggggcaactgcccatcctgtttcaggattattagttattttgcttggttcaccagttgtcatcgtcgaataatatactactgttttcttagtttcagcaaaatcgacatctccacttaacatgattgattttaaaaacttatcctcggctctaccacccgaagaaattattccgtcataatagaaatatccatcactatttgaatatatccatttattaccatattctttttcaacaacactagctcttggatcagcacttgtaactgtaatatcttcaccatcagctgttttccatgtttcactccacattgctcgagaaacaatattaccagttccagtattttcaacacctacttctttagtaactttatctccgggttcccaattatcttttggtgtaaatttttccacaacttctgacttaaactgtccagtttttaatttgttatcaacattcgttgtgctattataataagcaactgctccacctataactaaaaatgctgataacgaaataattgcaatcaaactcttttttcgtttcataattttcgtacccctttctcaaatatttaataaccgatatgtggtattaataatcaacaaatatacttttgtcatattacaacattattataaataatcatggtttgcttctggttatatttcactttccttaatattctattttaatgtttttattgaatctaaaaatcaataattgtcttaacttataaagaaaaacactctaacaattgttagagtgttcgtggcttcattagttgtttactgtaggtaatccattcaagaaattttttacagtttgatttgttgcatcagtgatccaagttgcagcagcttctttattagcttgtgaaacttgagcagtaattgttaatgtatactcagcgttatcatataaaccatttgatttaacttcagcacgtttaaatgtcgctttaatattgttattttcatcatctaatgctttaaattcttcttcagaaatttttacccattgagtttttgagtcagttccaattgatgttttatccggttcagttgctgcagttgtataataaaagtttttaatatctgttccaactacatcagcactattttttaaagtaattgaagttaggaaattttctgtatgtccatttactccaatcatctcattataatatgcccatccatcattaccgtcaacccatttatcgctcataccatttttatcaacaacactttcattattagtgtctggataagctactgctttaaattcttctccgttgcgtgtccatgattcttcccatttagcacgtgctactaaagcataatctcctgtattatcaactcgtacctcttttgtaacagttgctcctggattaaattctttaggtgtaaatttttcgacaatatcagagccaaacccttttgtttttaatttattgtcaactgtatgtgtttgagtaaaatatgctagagttcctacaactaccaatgcccctgataatacaattgatgccactacgcttttcttgtttttcatgatttccactcctttttattttttatttcattttacaaatcaatgataacaattgatggtttgcttctggttatatttataactcttattctattaatataactatcgaagaaaacttttcttttacaattaacagtatatctttatttggtttttttccggttatattcacaaacgaaaaataatattaaaaaacaaaaagagatgtataaaaatacatctctttcacgatttaatcaatagaaactaattgtccattttcaacaataattgaatcccaattttgcgtagcaactgcattagcaccgtcatctgcttgtacaccattagcagtgattataatcttagatttaagattagcatatgacattgtttcctcatgtgaggtaaaattattttcaataataaatgatttaaataaattgacagtctcattagattttaatggcatctttagatagtaataagatttacccttttccccagtagctttatatatccatttatcttcatcaattccacgaattacaattttatcaggatctttatcactcaagatatttccatcttcatccatccataccttttcaaccgtcactcttatgaaagcatctagttcctcagtattttttatatcaacaattttagatttttcttgtccaatcactactggatcatcatacttaattccatcttcactcacagaggcatcgggattagttgagctttcgataacatctattccaaattcaccaattctaatccggttcttagtctcatcactatctgtaaaccatgccagtgtggcggatacagcaagtacacaacctagcaaaactattagactcattatggttcttttctttttactcatctcgctacactcctatctttagactgtcactttttctttttcatccgctacaaggttactcaaaacaatatttaataacaatattccaccaataattgctaccgcaatatattttgctgatgaagcaaagatcgttccaacaacagggaggcagaattctaatgtctttccggctacattttgatattctaccggatttgtatcattagttggatttgcatcgccttttgtaacaaaagtttgtgaaatttcgtttttcactatcactcggtgagtaactaatgtatcatcatctactcgaaatgtgattgcatcgttttctttaatatcctcaaaagaagcagctttgtaatagatcaaacttccaactggatatgtgggttccatacttccagataatacaactacaggcttgtagccaactaccataggagcaagtataagcactaatgctattatcactacataacataatattgataaatagctaaccactttcttaaatatcttcataacctgcctcctatcctagttattaaaaatcttctccagatttctgttgattactattacccttataatcactccatgttacattatttccagaaatagcagcagttttaccaaaggtgctttgtgccccttcagttgtagctttacatgattctaaattaaatgtaatttgatagattattcctgaataatccaccgcatgagtatcatttgaaacttgctccgataaaaccagactatccaaaatgatattagttgttgtattagcttttaatactttagtgtaatagaaatagccgtcatttccatccacccattcatcttgccaggcagatgtccatttcttttcaacactatcaacgtcaccatttacaaaatcaccattttgattgatccagctttgactgtaacttaccctgattaaagcatcaatttcaccactgttggcaaatttaacctttttatcaacggtttctcctggtaaaaattgtgaatcttgattaaatttttcaatcaattcaatctccggttcttgcgttgccattttgttttctacattgacggtactattatagtaagcacttgtatatccaatcgcaacaatcaaacatactgaagcaaagattaaagctaccttcgtctttttaatttttaaaaatttcactttatcttcacctccatttaattccaagtaattacattgttagaaataactttaaaatcacgaccaaagtttgcttgtactgctcgatggttaacactatcgtcatcactatactgtactgcttcactaacaaatttcaaagtataatcagctgtttgataaatttcggcataattgctatcaaatttaagactagttaaaactttagctgtcatttcattagctggaagaacttttttataataataccagccatcaccaccatcaaaccagtcattttgccatgcttcagtccagttcttattaacaacttcattgccatcaactaacccagaaataaccttgccatcagcatctttccaaaactccgcataagaaactcttagaaagactggtgctgttccagtatttttgaattgtacttctttttctacttgatcaaaccagtctacagttgaatctttgtcaaacttttctactacttcagtatccactgttggtgtcttaatattattagtgacagatgcacttagttttgaccatgcgtagattccgcccactgcagtaagacagactgtcaccactaccatcaataccatcaatggtcgtttcattttaattctacctaaatatttcattgcgtcatccctcaccttctttattaattaccaactttttttatttctgcagcttctaaatcagtagttacaccatccttataaccttgcacagttaactgtggttctcctgcatcagccacaatatttctaaatttaattccttcaattacaaattttccagtagtttcatcaataatatctttccattcaatataagcattagtaccactgccacctagcttaccaccttgagcatcaattacctcaaactgattagcatcatattttactcgaatatcaacatcggtatccattgttgtaatacttgtaaaaatactattaaatgcattttccatcgcactactgttatttgcttttgtataatgtccttcactagctaaacgcgttaagaaactatcaaataatgatgaattattggaattaagaccaatcgtaaaaatcgtcttacctaaacctttaccagaacgattagttctattgcctgcatcattagaattattgttactacgatttttagtaatatcatcatttttatgaccataatactttgatccattactactttcaatgtaattattgattcctgttaaatttccactaaacttaataaaatcagcttgatttaaagcctcagctccaacccgatacccattatcatcataatcattataactagtattaaatcccttatttcctggttgaccgtcagtaaagacgattactgaacgattattttctccagttgcacttgataattgattacgaacttcatacaaacctaaatcaatttgcgttcctcctgaagctttaatatttttgataccaccattatttttagttaaatatgtgtaccatgtttcattacctgatttaatatctgataacttcacaaaattattattagtgatcgaaccatctgcactatatgcaaaagtaattactgatacacgactgtcaggattatgttcatataacttagttataaatttaattacattattttttaaatgggttagacgactgctgccattcattgactcatccatgctgcctgatttatctaatagcaagacaacgtcttgtggggcttttactgtcgtagatttaacatttccacttacattatattcatagttattgattgtttcacttccagcaggaagataattagtcttttcatcagtcgctttaaagaatccaacatgaccaaatgaatttgttagagtcacataaccattagctgcatctttattttgactaagttcgataatatttccactagataagtttgtttgagcataaccactttctgtactttctagcttatattccattggaacagtttctgttacggtatatttaccaaacggtaaattttctaaaagaacttcttcattattttttaagattaaatctgttttataaattactgcattttcactatctcgaccaaccacatgaataataaatgtcttatcttcactagaattgtttacaaccttttttacagtaagagttgcacttgtaattggcaattcttcattaactgttggcacattgaaatccaatgtagaatctttatcaatataatttttatagactaactgggttggatcattggctggataatctgtaccatccttatattcctctttaactgctacataatattctaaatgagcttgactgtttttttcaacatcacctacataccaagtgattttttttcgaccattttctgtacttacaataacataaccacgatcaaatattaatttatcagctacagagttatcataacggccatcaggtaaatctaaaagatcaacatactgactcattggatcattgacaatcccattttttatgattgtttcatatcgagtcacaatctcattagcaatattttcataaattccgcttaaatcactagaggaactataggcatatccttcaccttgagtagctacattcttcaagaaactattaacactacttccagttgtgtaaccaatcgtaaaaattgtatttccacttttctttgctaataatgcttcattttcagctaatgtagcagctgcattatttaaagaatagtgactattatttaaatataagtctaatgtaaaatcatttcttccgcccttaattacactatcataattgattgcattttccccaaaagtatatctaccactatatcctaaagctttatcagtagcggtcgcttcgctataatcattaactaaataaccattattgcgttcattatttagtttataacttcctgtcgcaccaccatcacttaataaaataataattccattttctgatttagcattttttaaaacagttctagctttataaagccctgcttgaatgttggttccaccatctgaattatttcctaattcgacatctctaattgcttgttttgcggtttcaagattgcttgttagattttgttctactgtaccatagtaattaaatgtcacaattgaatatcgattctttttatttccagaaattttactattattcaaaaactcaattgcagcgtttttagctttagtaagacgttttttatcatttgaagatgtgctatttccatgttcatcttcagccatactatttgaaatatcaaatactagaacaatatcattaccaatcgcctcaacactatcctgggcttttccagtagctaaatccaaattgattttataccgattatcgccaactctttctgaagttttattaacagtaactaggccatcactactagtagtagagccagggttattttccgcttcaacaattaagttagttccagccgctggtattatcatcgctaatgccaaaaccaatgtttttatctttctagtaaacttattttgttttctttttttagatatcttcatttagcttcctcctcactgacgttactgttaagcttcttttttgttaccagattaacgattatataaatcaacactagaccagccaaaattatttttacaatcattgattggatcattccataaatatatcctatataaggaatatttatctttactatcccatttaatcgactaaaggcaactgggtttgaatcttggctactattagcatcacccttagtaataaatacttgtttttcttggtctattttaattactcggtgagttatcacattaccgcttacacctgagcctttaaaacttataatatcatttacctttatttcatcagctttagctggtttaactagtaataattctccagttgaataaacaggctccatactattcgataatacaacatttacctcataccccagcaatcttgggccaagtgttataatcaaatatataaagcataagatcaataatatcgttgaaacaatattattaatttttcttattttattcacttgcttgtttccttttaagaataaagataccagcagcaattaacagtaaaacaattccacctgtaatatacaaataagtataattaattccttcttcacctttttttaaaggcgtctgatcatcaggaacttcctctgttccatccccaggtgataacggagtttctgaatcagtcacattttcggtatcatcaccttggttagttgtagtaccaccagttcctgctccaccagttgcagttgatactgcagtgttagcaggtaaacctacaggaatcactacaacactttcaacatattcctgtgttacatttaaatctcgatatacatatgtgattgaattatctgtttcaccaattgtaattgataaatcagcagctccaatcaattcatagccagcaatcgttttagctctctcgttcactgtactgccaagtggcgctgtcataacttttgttgtggctatttgaacattatcctgattaacataattgatcgaatattcgcgtccattagtcaaaacttgatatttggctacaaatgtcattgcaccagtaacagcctcaccactagctggaagggttttattccatcccattaaataatagccatcttctacattgatatcagggatatccggaaaacgttcgtttgctgctacatcgatagtaatcttattttcaccattagcagcaaatgtaccatgagctcctgccctaaatgttactttataggttctactagcatcaactgtcattggattaacaaagccgaccattgcaatcatcatagctagaacaataatgacttttttaattttcttcatgactgcaatcctccttatgctttttcttcttcaataagaatataactgcaaatccactaactgctaccaatccaagtaatggtgcaattacagttgcatcaccagttttgatactttcataaacatttctaactacttcaacaatagtactttgatcatcaagttcttcaacactaaaattaaacttgatcaatccttcacgattttgatacgtattatccattgaatcaccattaacttccaatgtcattgttactgtagtagtttcacctttttgtaaactagcaagtaacgtatcttcactcattcttccagaacttaaagcagccagatcatcaagtgttccattataaaactcttcaccttcattagtaattgtaatattataaacacttaatcccgaagtatcagtatcaagactatctaagacatcagcactcaaataaaatcttaactctcgatgatcatcattttttaaaacaatattttgtgttcgaacttcaccaggcataatatttttaaaattatcaaataaatcctgactaccatccaaaaaaataaagtcttctgcatcaccatcaaatgatacattagtatcagctgcatgaatagtagtcatagatagtgctagtactgttgttacaactaatgtttttaaaatatttttacctcgcattttaatgacctcctccacgactattcttctacatactgaataacatcattattatcaattttaacttctaagccccattcactcaaaattgcagattcagcaccaactttttgaattgcttcagcttcaaaacttaaatgagcacttaaaccagagtaacgcattgcattagtgttatcgatattgccagataatttgatttgattaacaaataaatctgttactgcccctggttctaataattttttataatagaaataaacaacttctttattttcatcactatcttgaataatccaattatctttatcattagtaatgatttcaataaaaccaggattagcatcgatcaccttattaccgctttcatcttcccagtatttggtaacagcaattcttgtatataaatcattttctgatgtattttttacaaatgtttgtttatcttttatagctccaggataaccaaaattaaagttaataccttcatccgttatttgaccatcttcatttgttgtagcatctctcaattcaattccaatattccctgaactaagtttgttacttgaagaagtatcggcacggaaataggcaattgcgcctccaattggaaccatgatacatagaacaatcattaatattaatagcttattttttttattttccatgatgattatctcctttgctttaatattgatcggtggatacttttcccacattacatccatattatatgtaatggtggttttaaagcggttatattttgttttagataataactttcttttaaaatctaaaaaagagttaagttatatctctaaaacttaactctgaactgaagactctattggttttttatataataattttgcttttgcaacatcataattcaaacgatatgtagtactattatattttgcataaaactttttatttattctttgaatgattgtatatgcattgtccatttcctgacacgctactaaaataatatattgtttcttattaattttagcaaacaagtcattcactcttaatgatgaagcaatcatttcttttaactggttcattacatgtacttgattttctattgtagttttagcattaagatcaaaaataatcaaaaaatatttcttattatctcgaagtgcattcttaagtaaaatttcatacatatgcttaaacatgtcatatccacagtaaaaccctcgataatcagcattattaataatcaaatcttcattaacattttcagtattaataatataatcttcttctatatcttctgtaatgacatcataaagctctttaaaccgcggtgataatcctgttcccaactctttataaaagcgttcattcaggtcatcataatattttaacgcattatgatagtcctttaattcaatcagccctttaatataataataatgtagaccttcgtaaaatggttctaatagaatagcatgataatttattgacatcatcttttcaaactgttttcttttcatgtagtatttgcaaattttgataacacagttaacatatgctgagcgaaaaaattctagcatctgttcaatccaaatagaatgattagtcgttatatataatttacctttatatagatgatttactttttgagcatatgctaggtccttatcacttatatcatcaatatattttattttgtcccagttataataaaactcctcagtatccatcacccattccaacttaggattgatttgataaccacctttaacagttaaaataacttcttcatcctcattaaaaatacctgatgcttttaaatctttacgaagtctaaaaatagaaaacttaaccacactatttggattttcactatccggatataaaatatcaataatattattcttagatattacaactcctttttgaagcagcaataattggaataaattaatcaactgttttcctaataatttggttaaatcaactgttacatttccacgtgaaagtgaaaacgttccaaacatatttacgttaatcttatcatttgccatatctaattccctcacttttcaagatatgttacttgcccacaaatttatccaccaaaatagtcatattctaaaaccccattacagtattagcccattatttttatttaatagtaatttattagtgataaattcttaccacttggtttaactatagattttcgtgcacaaaaaaaaacacataaatttgggtctatttacgtgttttatagtaagattatatgcgaacgaaaatctattctttcccgtgcaggaaaagtatgatcctcgattctaatttttttataaaaataacatattcattatagcactgtatttttaattacgtcaactttatttataagtgcggtaatactaattatattgatagaataaaaaaagattacgaatttaaaatcgtaatctttaattagttgttatattcaatttttattttactcttacagcacaaacgaatcctgaaccagacacagatgaaatcttaactacatcaccagttcttggggcatgaatatattgaccattaccaatataaataccaacatgtcctgatttccataagatatctcctggctgtgcttgggaaatactaatttgtgtacctgcattcttttgagctgaagatgagtgtggaagtgaaattcctacacgtgagtaacaccatttgacaaaacctgaacagtcaaatgaatttggaccgtctgctccccatacatatggacaccctaatctagaataagcagctgataaaacactattaccatagttattacttgctgccccgccataaactgcatttacctttactgataagctcgcggtacctgtgttaccggctgcatcagttactgtatatgtagctgttttagtaccagctttcgctgtactaggagcatcaactttgacattggctttaacatcaccatctttgttatcaattgctgaagcaatatatgcattaaaatcaacattttcaccagcattaactgtaattgaagattttgttaaactaattacaggagctgataaatctttaacaacaacatttaagttagcctcactaacatttcctgaactatcagttgcagaaattttcaatgtttgcgtttcatcaatttttgaagtatcaatagatccttcaacagttggtactaaagtaccatctaagttatctgtaacatttacaaaattatttaaatcaaaaccacttccgtaatctacagtaacattttctccttgggttaaattaataaccggagcttctaaatcgctaacagcgaatgtaaaagttttaacagtttcattacctgaactatcagtagcctttaaagtaatatcttgttgacctttaacctctgtatttaatggggtattagcctcaataaatggagttacatcaccatcaacattatcattagccttaacatagctagcgaaatctgtacttccttttacaggaacatcaattgtgtatccttgatttgaacctaatgattcaaattttggtccctcattatctactacattaacttgaactgtttttgtagcaacattagaaccactatcagttgcagtaactgatactttataagaacctaattgtgttacatttaatgatgaagtgtcagctgatacttcaattaaatcacgactgtccttattatcagtaatatcaatactatctacatcaaatttctcaccataggcaagatcgatttgattagacttaatctcaggtttttctttgtctgctgctgcataaccaactagcataaaactagcaacagctgcaatcggaatgaacattgctttacgattaacgatatactcgtcaactacatttttaaagcttgtcttaatatttctatccattcgttacctcctttcaataatatatccaattgttattatattactattttttagaaaaatctagccctgaaagctctttcatttttgtcctttggctgtatcgcaagctccgcttagctttcaagagaataatttttttaagatttcttaagaaatttataagattttacatagtcctaaatagaaattaccataaacataaatattaataataatattatccagaatttataactaaaaataccttattcaatgctctttaatgactcaaccatatcaatattttttaaaacttttcgcattccaaaatcaattaaataagtaaagatcattgtaataattattgcataaacataactcattaaattaacacttctaataaacatagctacttcaacttctaccgcattaatgataaacatatgtaaaactttcccaattcctaatcctacaattgatccgattgctgataaaattaggttttctctaaatacataatcatacacctcacgtggataaaagcctaatacctttatagttgcaatttcacttttacgttcttgaatattaatatttgttagattatacaagacaataaaagctaaggccccggcacaagcaatcaatatcacaacaacactatcgatactgcccatttgatctctaaatgcttgactaattcctttaacataatttaatgaatcaatattgctatccttgtcgcaatagttagtaacagttttacgattgccatcatcttctaaattaaaatacgcataattattaactggtgtctcacctgttagacctcgataaaattcttcactcatatatatatggtgttgaaaatacaataacattactcctgtaattttaacctgataatctttttcatcaatcgttatatttattttatctccaatcgttactcctaataattctgataatttagctgaaataacaaccccctgattatttaatttaattttttcacctgtttgataattctctagatttgtatatttgctaagttcctcattattcttaaatacttctaatgtaccataatgatctttacttcctacaactgtgatcgtttttcgataaaaactactgcaatcttttacactacttaaactctcaaactcatccttttctttttttaattgatcattacttagattacgatcaaatacaaccattccatcgtaagtaaaaatatcaccatattgcttatctgctaaagtagaaaccgaattcttgatcccaaatccagtaacaattaaagccgcacaaccagcaattcctataatcgacataaagaaacgctttttatacctaaaaatatttcgcatcgtaactttttgattaaaagacaaacgtttccaaataaatgttattctttctagaacaattctttttcccattttaggggccttaggtctaagcagactagctggcatctcacttaattcttgacgtgtcactatgtaagtaactaataaagtaatcgctactgaaatcaaaaatgtttggatacaaataaaagtatcaaatgaaatcttgattggtgcaccgacattaaacaacattttacgatacaagaaataaataatacttgggaagaaatatactcctgcgataattcctaatacactagccacgaaagtagctaaaaaagcataaatcaaatattgattaattacatcttttttatcatatcctaaagctctgaaggttccgctttggactcgctgttcttcaaccattcgagtcattgttgttaaactaactaatgcagcgaccaagaaaaagatcagtggaaagactactgcaatggctttcattgattgacaagcagaatcatagcttaagatactagcactttcctcacgtgttaaactaatcagttttccagttggaatatcatcaatggcactgcgagcatcatccagttttatcttagcatcatctaacgatgttttcgcttcatctaatttaatctttgtttcatccagtaaaacttttgtcttgtctaatgtaattttagaatcgcccagttgttttttagaattagtcaaagttatcgctgtttcatctaactgagctttggagctgtctaaagtaactttcgtatttgctaacgtaattcttgcactttccaattgattagctgtagcagccaaaacagcaccattattgtccaattccagcttgctcgcatccaaagtttttttagttgcatccagttgaattttagtctcgttcaacttttcttgcattattgcagcatcttctggcgtaattaaattattctcaattaaatattgtaattgtactacactttgattatattgctcaattcccacattatactgattcagtccattattatattgatttatcccctcattatatgcactgattccttgatcatactgagcttttcccagctgataatcactgactccttgatcgtactgagcttttccatcttgatattgctttagaccattttgatattgacgatacccatcattgtatttatttaaaccatcttgatactgctttaagccactttcatattggctaagaccattgttatattgagctaatccatcttggtattcattgataccatcattatattcctgttcgcctttttctaattcacgattagcatcacccgctaattcctcattgacctgagcaactttaccactaagaacttttttaatttctttattaacatcttttacataacttaaataatcatcactaaaaatattattatcatcactgttttttaaagtcactcgaatttcattaaaaacagttccattacgaagatcatatagatcttgcggtaaagctaatgattcattgccttgagctaaaatttcaacaaaagcctcattagttccatcaccgagagtatttgtcccccgttcaatcgtactaaaataacgaggatcattgatcaatccaacaaccttaaatttcttttcaccattatcattagttaatgttatcttacttcctactttgattttatttcttgaagcataattattatccaccaaacattcatcatcagcaactggaactgtaccatcaactaattcaattttattgaccttattatcaaaactctcatttgtatatactgtcgttcctttgacattatcaccaacttggatcaaagcatcaaagcgatttccatattcaacctgagcgacttgctcaatttttttaacagcttctatatcctcatttgtaaatcctagtgttgcaacgtaattaagatcattgaaagcgtgttcttgaagataactatccatcgttatttccataattgaagccgtatgccggagtcctgcaaaaaaggcagcacctaaaaagacaatacaaaaaatcgacaaaaaacgtgctttagttttttttattatttgaatttgattttttacatatgctctctttttcatattaccactcaatttccgcgattgacttaggatgttcgtttatattcattgaagctacttgaccatttttaagatgaatgattcgatctgccattggagctaaagcactattatgagtaataacaattactgtcattgtatatttatcgcacatctcccgtagtaatcctaaaatcgctttaccggtttgataatctaatgctcctgtcggttcatcacataaaagcagtttaggatttttagcaattgctcgcgcaatagccacccgctgctgctcaccacctgataactgagccggaaaattatctaaccgtttatttaatcctacacgttccaaaaccattctcacatctaaaggattcttcgatatctgggtagctaattcaacattttctaaagccgtcagattttgaaccaaattataaaattgaaaaacaaaaccaatatcatctcgtcgatattgcgtcaactgtctttcactatatttagcaacatcttgaccatcaactaaaatttgcccacttgttgctttatccattccccctaaaagattcaaaatagttgtttttccagcaccagaaggcccaacaattactacaaattcacctttattaacttcaaaatcaacaccatctgatgcattgatttcgacatcaccaactttatatgtctttttaacattattaaatgtaatgaaacttttcatttatcatcactacctttctaattaaaacatatacataattatatcacgaaactattctcaatccaatttctacttttttaataaataaattaaataatgctactcatattacaagaatttttataaaaatcgtgctaaaattaaatcaattaggaggtctattatgaaaataatgattttatcagattctcattctgtttctaaaaccgatttattaacccttttaaaaaacaactctgttaactattacattcactgcggtgatatttatatgacttatgatggcatcaatcttaatagtttttatttagtccgtggtaataacgattttggtaatattcctgatgaattatttattacaatcgatgatttaaaattttatattgtccatggtcatcgctatgatgttgattataacctagattatttaacccatatcgcaaaagaaaagggagctgatatagtttgtttcgggcacactcatcgaccttattacgattttcatgaaggaatcacttttattaatcctggtagtgtttgttatcctagaggtcagtatcgtaatccaacttattgtatttttgatactaagacaaaaaaaagtactttttatgatgtcacgacattagaaccatgtgaccctttttccccaatggaacgtcctaaaagaaaagaaccattttataaaaaatggttcaaataatcggttccggcaaaactttttggtacatgagcgtacaaataatcatacaaactagcattgggataatttgaatcaataacaatccccccactagataaaaattaatcaatcctaaactatacaatttaattaaaataattatttgatacaacaaaggaataacaataattaaaccatagaagataatcatttccaaatcgattatcttttttaaatcttttagatcataccccatatgatacaagttaagaaagctcctttttcgtccttgcaattccattcctactttaaaaatagttgtaatcgataacaataccatgacactaaaatatgacatcaacgtaaccatactaatcaatggggtatctaaagtataaatagttgtacacatcaaaataatcgctgctatggttattactaaaacaagcattctaactttttctagatcatagcgaacatttcccagcgtaattaataaacagcggtcttctaacgattcattagtttgccgattttcaatgaattcaggaattatattcttaactaggccataaacaccaattattccaataagagcaatcaataaatgactagctgtatcattaagaaaaggaaatacgatcattggtaaaataaacaaaacaagatatattcgatttgatagtttctttacgcctattccaaatttttcaattttaacatttgcagtcaccatcttattgatgctggtacgataacaatatcccatatttaaaagcgtacaccagccaatttcacaaaataaaatgatagcagttgccataaaagtattactcgaaatataatttaaacttccttgataatcaaagaccataaaaagtaaattatttactaaaggaactagaggataactaatgacaaaaccaattggaatagctaaaaacatgataatcgtactctgtaaaagcaaataaatcccaacttgataaacagatgcccctgacatcaaaacaattgacacatctttagttttcgctaaaacataaaaatcattagccataaatacacaaaccattgcaatcaaaattacaaaagcagctatcgtagtaatcaactttgcatcattcccaccaagattgatccctgtactaggattaagtgtaagattaaagaataaaaagataaaaatcgttgttaaaacaaaagatagaaaataaaataaactctttaaaaaatcagtttttaaagatcttattgctaattttattaagcccattagtcaaacaacgcttgcgattctgtcgaattaatatcaacgattttgtaaaaatactctttttgactcatatcttttcgctctattgtttcatcaatcacaccatctttaatatataataatttcgatgaatacgaagcaattttagaatcatgagttaccattaaaatagatacaccgtcattaatatttaaatctctaaacaacgataacaattcatgagaatttttactatcaagatttccagttggttcatcagctacaataatctttggattagtaactaaagcccgacaaattgctgccctttgtctttgtcccccagaacactcacttggatatttattcaaaatctgctcgacatctaaccgttttgcaatctttgcaactgctgcttttatctctacttttgattttcctgctaacgtcagcggtacagcaatattttcaaaaatcgttagtgaatctaataaattaaattcttgaaaaataaatcctaaattttcatatctgaatttaccaatttctccctccgacatttgtcgtacctctttaccattaatataaacaaaacctttagttggaatatcgattgttgataaattgttaataaaagtcgatttaccagctcctgaaggacccatgacacaaacaaattctccctcatacatttctaaagaaacatcacttaacgcagtataggggttttttgtccctacaccatatatttttgttacatttttagcaactaaaattttattttccatcattttttcctccatgaatcggtgctaccaccgcttttttataattatagtaagtaattaaacctgaacaaacaacaggaataaagtagaccccaattactcctaacgcaaaagcaaccgacatctccccatgataaataaaacatcctgaaataataattatataaatcattggaattaataataaaactaaataaaaataaaatacctcatacttaattattttagttatttcttttcgtgtatacccaatcttccaaagattaaaaaataaagtttttcttgtctgggcctccatacaaaatttataaacgatactagttattaacaaaatgattattacaatgtaaccaatcactccagtaatatattcacgaggtgctccctgattagcagcgattgccgcaatcatccctgtaacagaaatcatcattaaactaattagtaaaatagctcgctgaattgaataaccaaggttagaaacataaatcaatgcatatctcttttctaataatttcttttctttaaacttcttaatatactctggcagcgcatatctaatcaaaccaatagccccaacgatccctaccccggtaggtgcaatataagcggtagcactatgctcattcataaacatcataactattccaaatacatataaaaataaataaacagctgatggaattactaatttacgtttatcactaaaatccattgccttttcttgttgtaacaaacttgaaatatcatttcgataaatatacccactagcaaaaacacaaagtgcaactaggatcattgcaactacaactatggtctgcataaatgctgctgaaggtatatgataaatcgatgcctcaatccccaaataatgaaacatccaataatttgagattggtgtaactgccatccccaacgcaagaccaattggtgctgcaatcagtaataatacaaatgtctgataaatcaaatatttagtagatttaaaagaactgtttcccgataatgtcataatggcaatttcattagtttttcgagaaataaaaaagctatttgcaaagaaaatcataaaacaacaaaagcaaattatgataaaagataatgttgtagaaagcggtacattgacttgattccatgtagcaccaccaacgacagcaccaggatcagctaataagtcgttattcataatattaaaaaagataaagcaaactgcaatagcaaaaaccattgtcaaagcataaaaagcactctttttatactctttcaccagtaatgtcattgcaaacttaaaatttctcatacttttctcctatctaagttttaaaaacttgattaattttattgatcaatttaaaaaaattagtcatttctgtttcatctaaacatttagaaaataattgcactaattcctcttgtacctttctagtctgaactatcatatctttaccatgatctgtgattataacattggttattcgtcgatcagattcgcacgctttaaccttaacaagactacggccatgcattcgtgcaactattcctactgttgtagcatgtgagacatcaaattccatactaatatctttttgattgatcgttcgatcctgattatcggctaaaaaaatcaggacactaagctgtgtaaaagttaatccatatggctttaaacgagcatttgcataattagcaatatttcctgccagtttatttaaactgaacattacttcataatccttcatttccgcctccctaatatgtagcctgctacatattaatattataagatgactaatattaatagtcaattaaaatatgtagtaagctacatattctaattgactaaaaaaactataccttagtatagttttaatattcattcagctcttttttcaaatcttcaatatatctttcttcaaatttatctacacgaacaaattttcctaatatcgattgaggttcaaaatcaaaatttagatacatgcgacatccaccatcaggcaaaggggcaaattgtccgctccaatgaccacgataactattattttcaacatcatagtcaaattgaatattttcacgtaaatctgtaacaaaaatcttcgtttcccgctgttttcgatcatattcaataaatcgattatcaccaatctgctcaacccgtgttaaatcactacgccatgaacaatcctttaaattagttattactttaaaaactgctgctacttcacttttaaaatcaactgtcatatctattcttttcattttttgagccctccacgattccattataacacaataaaaaaagagaaagcgaactttctctaaataattattttgctaatgctttttttgctgtatttacaattgcagtaaatcctttaggatcacaaattgcgatttcagataacattttacggttaacttcaacgttagctaattttaatccgtgcattaattttgaatatgagatatcatttaatcttgcagcagcattgatacgtgcaatccataattttctcatatctctttttacttgtcttctatctctatatgaatatgctaatgaatgcataacttgttcatgagcagttttatataatgtatgttttgatccaaaatatcctttggctaattttaatactttttttcttctacgtcttgtagtaaatccaccttttactcttgccatttgtttcttcctcctatgtcaataattattttgctaatctagatttaattctcttgtagtctgatgcacttactaaagtagctttagctaagtgtttcttttgtttatgagttttattgtgagataaatgtgatacataagcatggctgcgttttaatttaccgctacctgttctttttaaacgttttttaagaccactatgtgatttcatttttggcatgatatattcctcctaaattattttttctttggtgcaattattgcagttagagttctaccttctagcttagctggtttttcaatttgaccaacttcagcacattcagctacgaagtcatcaataacttttttcccaagatccatatgagctaattgtcttcctctaaatctaattgcaattttaactttgttaccttcttctaaccatttcaatgttctttttaattttacatttttatcatgaacatcaatagttaccgataattgagtttcctttaaagcaaccactttagaattacgtttcatttctttagctttcttttgttgttcgaaacgatatttaccaaagtccataatacgacatactggtggtttaccgttaggggcaacacacactaaatcaagtcctgcaccataagcaatatcaattgcctggttacgacttttgacacctaattgatcaccattttgatcaatgactagtacttctttgaaacgaattttttcgtttactaactcatccggttgttttggttttctgttatcaaatctgctaataaaagccacctccattttagtagtttaaacaaaaagtgagcacactgagtacccacacattgacattaagatagtttatcttagcgacatttgcctatcgacataatcaatcaggcgagaagtaggcacttcttctttccactacttttcatttacttgagtatattatcattttatttaattaaagtcaacccatatttaaaagatttattcatcttcatctatttgtaaatatttaaagtatccaaacaccgaaaagactatcaatactattaatgcaaacatttcatcaccactaataatatatgtaatcccaataaaattattacttgtttttatgattatgtttaaatactttccattctacagcaattatatttattaataaatataaacttagccaaattcttaatattttcaatatcaagataccaccatttatttctcacttagcgaccgcttgccccctagttcttcttgtgtcaaattatactgcgcccacagcctcttgctactatagcatatcgactaaatagaagctagaaaatgccttgctacttatcataacaaggcattatttaaacatttttttaaattcttctggtacaaccgctttaaattccattctagcttttgtatccggatgaacaaaggcgaatacatgactatgaagtcccatccgtttaatcggattagttgtagcaccatactttttatccccaacaatactatgacctaatgattgcatatggacccgaatctgatttttacgacccgtttcaagaaatacttcaatcaatgaattatatcgtgattcttttaatactttataatttgtaatcgccaatttacctttaccattattagcaatataaaccatttgtgtcttactttcatcaaggtgatttttaatcgttccatgtttctttttaagctttccttcaataattgccaaataaccacgcttataaacaatatcattccaattattttgtaatttatttttaattatttcatttttagcaaacaacagtacccccgatgtttctttatcaagtcgatgaacaataaaaacacgggcatttttatttttacttttaagatactctccaactaaatgataagctgttttttctttttcatttcctccggccatacttagtaaaccagccggtttattaataacgatcagttctctgtcttcataaataatatctagacttgaattattattaggattacgatcaacaacaatctcatcatcccgttttaatgaataatcaaactgactaatcacttgcccgttgacagacacctgcttaaatttaagtaaatttttaacattctttttattatagtgatttaataaaaactccattaacgtagaatctgtcttcactaaatacttattcatcgattttttccgccttaactgccattccagaaacttgacactcaatcatattgttgccaaggtttgttgttgtaaagcgaacattaatgattgctgaagcatgtcttcgagaagcttgagcaactgtttctgccatcgcttcttgtcttgctgtatctaacatttcttcaatattagtattatcactagcaattgcctgattcatgattttactgctaaaaacgattcccagactctttgtaattcggtatccgggtaaataatcaatcgtacttacttcaatcatatccattatattttcctccttataagaaaaggttactaaagtaacctatttcatatcaatgattcgatgagtattaaataatacaactacaacttctattaaataaattactaatgccatccaccaaggaataataaataaaacagctaagatcattaagattacattaataaacaatcctacaaaaatattttcaatcgtaatatatttttgtttcttagaaatcatgaatgtttcaataacggtattaagatcagaattcatcagcataatatcactattttcaatcacttttttatctttgatgccaccacggctaatacctacataagctttttgcaataatgcaatatcttttgaattatcaccaatataagcaactggtccagcaatacttgctttatccattacttctaatttttcatcaactgtcaaattattatagattcgatactgatcattttcaagatcaactggtccatcattgaaaataatcaagccaacatgtaattttgataatttagcgaataattccatttcctcttcagttacttcaactccatcaaaacgatcataaataactgttcgacataaattcaaagcatctaaaccactattttctttaataacaatatttttagaaaaagctttagccactcctgatagaacagcaaaagaagaagcctgcttgtaagcaaaagaaccagaaattgttattaaaatagcccctaaataaatatatttaaaatttgcttcaaaattaagaattggcactaatgttgcacaaagaattcctgcgacgactaaaagaactgtatcaatcttactgattaattctaccagcctatgcgttcttgaagaaccaacaggtgccattgtcgcaatttctaagactctgctcattgcactgcgatcatacgtatataaaattttaattctcaaagtgtctttaacattgacacttccactttgaacttcacttccggctttaactggctctaaaatatctgatccattaatggcaaacatatctaattcactttcacccgaagcaatcttgccacctagaggtatcgtttctccaggtaaaactacgatcacatcaccaatatcaaaatcttctaaagaaaccatctcatattcattttcaccaatttctcgacgtcccaattgaattgggttgatctcgtcatcaattttctccatcgttaaattgattaaacgcatcaataaccgttctccaacttggtaaatcaaagaaaccacgatagcctcaatataagcaccataaacccatccaaataaacaagctagattaattgtaatattttcacttaagaattgtttaacttttaaatctttatatgcttgaaccaaggtcttttcattaaaaataatcaaagcaatcagccaggcaatattagttataaaattaggatcatcttttgtaactaatccaagtgctaaagctacaaataatcctgcaattctaatcattgtatttaaatatttttgttgaaaaatatcttgtgatttaaatggcttcttccattgctccacatcaattttaggattgactttatcaactagacgatttaatcgcactaaaatattcttttgactagttgtgactttaagtaacttattagtaaaatcaagactaacattttcataggctgaatatcgtgaaataacttcctcaatttcttttgcctcttcttctgtctctaaattagtaaacataaaaatatgttctactttttgttctggtgccacgaattcacgcttacgtgagttgatttcctcttttaaaacaagattttcatcatgattattcaaaaccgcctgcacattttcaggatcttcacaataaaatgaaatacctgtttttccaatcttgattcgtgaaacttcttccatttcgtttaagaggaggctgacctcatttaatttatcattatcatttatattatcaatatagaaattacgagccatagtaatctcctttccaatagtcacctaattttagcatatcttcaaaaaaattccaactctactcattaacaccataaactaactgtaaaatttgaggataatagcgttcaaattgcaatgcatcaatttccgttggataagacattaaatgaaaatacagacgatgttttaagttacgcacaggtggtacaaaataatcatgctgatcatttagcactaagccatttctttgataaaacgcaatccgtcgacgactttgctcatcttctggatgttcaacttccaaaataaccggtttccctgccgtctccataaaatgttttaacatcttacttcccaaacctttgcctttttgattaccatctattgcaaaataatcaacaaaagcaaattctccaccatcataatgtgataaaatacctttaatttcatcatcttcttttaaagtcaaaactttaaaatcaccattaataaaagtctctttcatataatcatattctttgatttctttactaggaaaatttcctaaaataactttataaaaatcattaaattctgctaattttaaatcttcaaatatcattttctaacccccgtttttttatttattaaaacaaagttttcttcaaattcctctttagtacatgacaaatcaaactctttaccatatattttataatttacctgaagctgaccactatcacgaatcacacaatcgtaaacttggcccttagtaaatagatcccgctgttctttaccaattacaatattcattgtcttgatacaacgacacacgcgacgttttcctgtatttgcgatagtaatcacctcttttctcattcattataacatgataattaaaagaaaagtaagaattagccctgctaattcttactgaattccaataactctaaatcaggattcttctctgtagcccaacgaacgccccaatcattagtaaataataataaatgttgtccttttaaatcttgtactttttttgtatcactagataaatttaaagcttttaaatcgcatccctctttaacccagcgcacatattgatatggtagcggctgcttgattatctcaacattatattcattctttaagcgatattctaatacttcgaattgaagtaccccaacgacaccaacaataatttcttccattccaccgcctaattcagtgaaaatttggattgctccctctttagcaatttgttctacacctttaacaaattgttttcttttcatcgtatctttattacgaatcaatgaaaaatgttccggagcaaaggtaggaataccttcaaaagcaaatttagctttacctgttgtaatcgtatctccaatcgaaaagatccctggatcaaaaactccgatgatatctccagcataagcttcatcaacttcttgacgttcatcagccatcaattgttttgactgattcaattttattttacgaccaccttgatagtgatatacttccatccctttagtaaatttaccagagcaaattctaaagaaagccattcggtcacgatgtgctttattcatattagcttgaatcttaaaaacaaaggcactgaaatcttcactaaatggatcgattgttttttcaccagtacttcgtggtaatggtggtgttgtcatttctaagaaatgttttaaaaatggttcgattccaaagttagtcaaagcagaaccaaagcatactggagaaagtttaccttgacgcactttttctaaatcaaaatcatttcctgccatatctaataactcaatatcttcctgcagcttattatataattcttcatctaattcattaattaattcaggatcatcatatttcattattttagtatcaacttctttacgcccgccatcaacagggataaaacggattacttcctgatcatgccgttcataaacacctttaaactgttttccagaaccaataggccagttaactggacaagtatcgatccccaattcttgttcgatctcttccattaaattatatggatcttgagcttcacggtccattttattgataaaagtaaaaattgggatattacgcatcgtacaaactttaaataatttacgagtttgatcttcgacccctttacttgcatcaataaccataactgcacaatcagctgccattaatgtacgataagtatcttcagagaaatcctgatgacctggtgtatctaaaatattaatacaaaaaccatcataattaaattgcaatacagatgatgttacagagattcctctttgcttttctatttccatccagtcacttgttgcatgtctgctgttcttttttccttttacggtacctgcctgttgaattgcccctccgtataataagaatttttctgttaatgttgtcttaccagcatcgggatgggagatgatggcaaacgttcttcttttttcaacttctttgataaaatcgctcatttttatatctccttgcaaggattaatcatatagatttataatgaatttgtcaaccgaaatctatttactcagactgtttaacggagtcttcgtaataatgaaagcaaagacagtgaagattacaaatccaccgattatcacaaacggataaactattaattttcccgattcaatcaataacggtaaaattgctaaggcaccagctggcggaaaatataatttagtaattttcataatgctcaacatggtcattacaattataattgcactaatagttaatggcaaatcaccaatctcacttatcaaaattcttccataagcaccactaaatgcacaaataaaggtaacaaatgctaatttaatcgaattatgacgcaactttgggtgattactactcaattcaacaaaagcaactatcaagggtggggcaatcaaaaacggtaattttaattgtaaagcaataaaagccgttaatgctaatgcacataaccgttttaaatttaagctataggtttctttaactgctgcagtaaccggatgatattcctgaacactacgatagccgcccttctctaaatattgttgcccgattacaatcaaaatactcattgcagtagcaaaaagcggatacaaccatgactcactattaataataattggtaagatcgttgcagatatcaatggagcaaacgtcgttttagataaaaataatcccgtcacacatactacaaagccaattaaaattttaaaataaatatcaatatctacatatttaaccaaaataatccctaacgacgcataagccgcaattaaaaaaaccaatttaattttattagttttccatacttgtttaggcgctaaccatgctccaatcgtcaatgccgtaatttctggaaaaataaattctttttcatgaaacacttctgacatcaagatcattaaagctactagcaagatcgtcattatctggggaacaatacttttctttacttccatcattttcacctcaatagaactcattctattacaaaaagcgagtatagtaaataagaaaacgatataacctaaccgttatatcgtcatttcttaaaatacaaaatttccgttttcaaatatccttactacttgaccatcttttgtttctcccacaattttcaaatcactagtaccaatcataaaatcaacatgagttaatgaatcattgactcccttttccaacaattgttctttagtcattgttaaaccaccttgaatacattcactaaagccttttccaattgctaaatgacatgaagcattttcatcaaataaagtattatagaataatgttttcatattagaaattggcgaatcatatggtaccaaggcaatttcacccaaataaagactaccttcatcaatactcaacatctcttttaaaacctctttacccatttttgcatcaaaatcaataattcgaccatctttgaattccattttaaattcatcgatcaaattaccattataatttaatggcagagaactatacacaaccccattagtcccattacgatatggacttgtaaaaatctcctcggttggcatatttggaaaaaaatattgtcctttagtcgtataagaacccccaccagcaaataggtaaccctcatttaaggtaacagttaggtttgttccaagcgaattagtataagtcaatgtatttaaattcaatttatttaaatatgctactcgagcttcaaaacttttacgatgttcctgccaggcagtcaaagggtcatcatctacgactttaaccgctttaaaaatagcattccacaacgcctctactgcctcactatcagacatatcaggatatactttatttgcccatttaattgaactgccagcaacaatgcaccatgtatttatccccaaatcaaggctatcataaaatggtttacaagcagttgatacactttttgaccacaatgcaatctttgcaggatcgattcctttaaaaccttcaggatcatcactaataattgttaaaaaggcagcctttttagcagcataatcatttctaaattctttaaaccacgttggaacatgagcaaacgcttctttttcaagatatttatatttatatcgtgaaacaacttcatcattatattttacaaccacttccctagctccagccgcatatgcctccttagttactaaacgtactaattcaacactctcaacaggtgcatcgattacaacaatttgagctggctgaacatttaaaccagctttaacgatcaattgtgcatattttgataatttttctttaaacgacatctttatctacctctttccatcaatttattataatcaatctaaacttctttatacctctttatcgagcttattcaactcttcaatcgcctctttcattcctttattggcagcctgcttaaaatactctttggctttttgtttatcttgattaattccatctccataactatacatatagccaatcataaaactagcatcataatacccacgttcactagcctttaaaaacaatttaaaagctgaagctttatcaactgttgttccaataccataaaaataacaacgtgctaaattatatattcccggcacatattcatcacttgttgaagcaagatagtatttgaaagcttcatctaaatttttatatccaccaattccattttcaagatatattccatacatattcatagctggtccatagccttgattagcagcaatctgcaaataagtaaaagctttatctagatttttagcaattactttaccttcatctaaatataaagccatccgatacatagctcggacatcattttgatcaattgcagcttcataatatttgattgcctttaaatcatcatgatactgttcattatgctcatagatcaaacctaaattataaagggcaattccataatcttgatgacttgctaattcataatactcaattgctttatcaatatcaacatccactccattaccttcttcatatgccaaagctagatgataaagacccggagcataattagcttctgcagctttttgatataacttaaaagcttgatgatgatcaacatccactccttctccatgatcgtataagtaacctaaattacataaagcccgcggataacctgcatctccagccaagcgataatagcggacagcttcatttaagtcgacatctataccaattcccatttcataacaatatgctaaattacattgggctggagcatacccttgattagctgctttattatatagctcaattgctttgattaaattttgtttaactccaaaaccactttcataacagtaacctagtgctacgattgcctgaacatcattttgtttacttgcctgacgataccaatatgaacagcgatatggtgcatttttaatttcaggatgattctcataaaaataacccaaccaaaactgtgctcgcgaatatccttgacgtgcagcttttaaataattttgacgtgcagcttttaaatcaatatcagttccttgacctaattcgtagcacgacgctaacgcaattaaagcaggagcgtaattaacttgactagcttgataataccaataaaatgctttaacaaaatcttgaattgttcctaatccattttcataacaataacccagacggtgttgagaacgttcgtgcccttggttcgcagcttcttcgtaacatttgaaagcacgttcaatatcttgttcaattccttcaccaaattctaaacaagttcctaagctatacaaagcctcactataccctagtttagccgcctgataataataattaacagcacgtggaagatcaacagcagttccatgaccgtattcgtaacaatagcctaaattacaaatagcacgagcaaatccagctcgagccccaaattcatataactcaaaagctttctgataatcttgtttcacaccgattcctaactcatagaaatatgctaaattgcagcttgcgacaacatttcctaaacttgttgctgattgataataacgaaaagcctgataatgatcttgttcgacacctagtccacgttcatataaataaccaataatgcaaacacaatcactattatccacctctgctccctttttaaaatactttaaagcttcaagatattcatgtttatcaaataatttcaaacctaattcatacaataatttaccactgacattatttatattttgtaaacgatcaacttcatcaaccatcaaaagacataggtcaataccaattatctttccttgattatcctcaataagatattgttcataatctaaatattcactttcattgattacttgcaatcctaatctatttttaatctcttctacacgtttttctaaaaattcaatattattatcttgatcatataatgttattacttttaaaagagccgttttctcaacaccaatcgattgatgtttaatttttatcaatgattcttgatcatgaatttctaccagttctttaaacaaccattgattaaataacggctcataacttttaacacgatcttttatatccatacttacctcctttcgatagagaaataagcagatattgttatctgcttactgtccattaatcatatgagatatctcttttgaatactttcctaaaattgcactaaccttgttacttgtttgaacgattccagaagcaccaagtgcttttaacttatctaaatcaaccaaactatcatcatttacaaagaaagtgacttttgaagaagtagctgttgtttctttaatattcgtcttaccgccgacagcttcgataatactatttacatcaactggaatatcagcagctgatacttgctttggttgcttattcttcattacttttaggaaaataaacactaatattacgattacaatcagtgcgattattccatataataaatattcattcattaaaatataccccctattaattaccatttaattatagtatactataccatgatagaaaaaactatcatttttataaggagggattttgtggaagaaaaagaaaaatccgttatctgttggccattaatcggtctattactattgctttgtttcattagctgtctgggaattaaaagcgccactcctttgattactaaaggaaatccaagtggctattggattaaacagctaatgttttatggaatatcatttatcttgatgtttatcgtttataaagtctccaacgatcgaatctattcatcgatgtggatcatttatggaattttaatggttttactagttggtcttgctattgatcactttgcatttacgcgatttggaatacatattgttcctttagctaaatgggcgggtggtgccacatcctggtacaatctcaaagtatttgatctccagccatcagagtttatgaaaatcatcatggtggttgtcatggcagatacagtcgataaacataataatcgctatttagtacataatattcataatgattgtttattgattggtaagctcttagctatttccttaccaccttgtatcctcgtttatttacaaaatgatgccggagtaacaatgatcatgcttgcatcagtagtattcgttatttttatgtccggtattcaagccggctggtttatcataggggggattgtagttgcaatcatccttgggattggagtttatctattcttataccaacatgatatttttgctagtttaatgggaggagaccataaattaaatcgtttctatggctgggtcgatcccgagggtacctataatgatcaaggtttccaactgtttaatgcaatgttatcatatggaactgccggcctatggggacatggtatgggaacagctatcattaatcttcctgaggcacaaacagactttattttcgctgttattgccttaggatttggatttgtcggtggcggtttcactattgcagttgtctgtgtacttgatgccttattaattagaattggttttaaatctaaaaataatcgggataaatatctcacagccggaatctttggtctacttatcttccagcaagtttggaatatcggaatggttttaggactatttccaattactggaatcaccttaccatttctatcctacggtggttcatcacttctttcatatatgattgcaatgggaattttcttagatatggaacgacaaacgcgaatcctcgaaggaaaaaagcgctattaacttattaattatataagatgatttattaaatgataaatcatctttttatttcgataaaaaagattccttcatttaatttcagctatttgctatccatttatgaggaatcattttaattcttttcaaattgttttgaatctttctttacttcaatcagacgttgtgtaaaagggtcaataaaacttaatgctatactatccaaatagtaagattcttgataaatcgaatcataaagtgtatccccaactaacggatgattgatactagataggtgaaccctaatttgatgagttcttcctgtttctaagatacactctattttactctgattagcacttacctccagtccccgataatgggttacagcaaatttcccagctggatgaatcagtcttttaacactttttttatctttaataattggcgctgtaatcgttccttgtcccgtcaatactccctctactacacagtgatagacacggcgtacctgcttgatatctctagacaataaataatgagcataactgtttttagctatcaacaataatccttgggtatctttatccaatcgattaaccaaatgaacggttgcctttattccctggctttgatagtaataaacaactgcattggctaaagtatttcgaggataacgctttgtaggaatacttggtaatcctgccggcttatcaattactaaaaaattttcatcttcatagcaaatttttaaagctagcggatatggttccatagtactaacttcttcaggccacaataattcaacaacatcaccgtaccgcaaacaatatcgtaccgtttgacgctgaccattaacaagaattttcccatgcattttaattaatttaacagcttttttactaagctcctgttgactaagaaattctcttaacaacattccgctttctttcattgcgataataaatttcattcgctgataaaagcccttctaattcgttgaataaaagacatttccttatattctataaactttactactttcttagaaattctaatttcaattttttcaacatcatcaagatgataagataagtgatcaattcccaaataaactcgattaaaatgctgtccttttaacttaatcaccttattttcatctaaaattaaactagcacccaaacttcgataagcattatgttgtatagcggcgacttctgtcagttgcattaagggacttcctggataaataacagctccaccaattgacttattataagccgtcgatcctgatggtgtagaaacacaaagaccatttcctctaaatacttccaaaagctcatcatcaatatagacatcaattacttgagttgtatacccatgatcaatgcgcatctcatttaatgctaaatatgtttctttacctgctttatgatacacatcaacttctaataaatgtcggggcgtcatttgataatgatcagcttttatagccgcaatcaattcagtaatttcatctttttgataatctgtaaaaaaaccgagggttcccgtatgaacacctacaaaactaactttttgctccatatattgatgcactgacaaaagcattgttccatcaccaccaacactaataaccaaatcaggatcatcgggattatattccataattccggttaaccctttcttaattttttcagcaatattagcagacatttcatcctgttttactactaatgcatattgtttcattgttttcaccaaccttagcgtatatactatagtatatactaatggaggctactatggaagaaaacttagaaatagaatttaaagtattgatcgacaaagaaatataccagcaaatctataacgatcaccacatcgaccatcaatatagtcaaactaattactatttgattcaccctaaattaactgaattaaaatatatgctgcgaatccgtcaaaaacaagagaattatgaattaaccttaaagcaaccacaatcatatggaaatttagaaactaatctaaagattgacaaaataactaaagagaaaatcattactcacgattttgttactaatgaaatttttgaccttctaaaaccccttggattagatagtacgatgtttaaaacagactgtgtacttactactacacgttgtgaaattaagactactgatggcttgatttgtctagatcaaagtctttataacggaattactgattatgaattagaatacgaagtatttgattatcatcatggtaaacaaatatttttagactttattggtcaatataatttaaagtattctcgtaattgtcctagcaaggtaaaacgtttaatggatagtttaaaagatgattaaataatcatcttttttactagaactaaaaaagcagcgtttcataacactgctatctatctttaaaataagcctctttaattgagcatggttcactaataaattgtggacaaacttcactacttggacattctgctaatttacgtaactcacgaggaataaatacccggatttcctctgcattataacctacctggaatcttcgctcatcaatcataattgggcgttttaaaactgatggattttcttgaataaacttgatcagctcactaattgacatgctatcaatgtcaatatcattttccttaatgattttacttcgcttagaaatgatatcgtctgttccattttcgcttcgttccaatagttcttttaattcaatttctctaagcaaggttgaaaaaatatttttttccacataaggaatattatgttctttcagccaagacttaacctttcgacatgatgcacaactcggtgctgtgtaaatacgaatcataataccatctcccttacttcactattatacattatttttattatttttctatcattttcgttaatcatagtaaaataatatgcaaatcgaggaacttgaattaatcaagttcctcgatcattttaattacctctatttttgaaaaacctagtttcctcatttcttcaataaaaactttaactttatcaagtgaaacatctttttttaattcactgatcaaattactgtcttcactgacaaaacgtcctaaagctcgcctgctataaattattcccgttctttctaattcacttaaagctttttgaattgtattgggattaactccatattccaacgctagctctcttactgaagcaagcttacttcccggtaaatactcactagcaaaaatctctttttttatttcttccatgacctgaatataaattggtaaattaggatcgaagtcatttttcattctaccacctactctacttcaattttatgatcaattaaataaacagtgaagaaataaaatgctgtcgctaatactaaatttaaaacaatgctaaaccaaacagaagcagtactatccaaactcattacaaagctctcaattggctgccacattaataagctgcttcctaaaattaaaagtgctacataaacaataattccaataacagttttgtgtttaggaatatatttagtctttgttaatgtaataatagcataaaatgataatatcattgaactaaccatcgcaattgaatcaattaaatttattactactaaaccaaaattattacctaaagcctttaacaactcaccaaataaatcaaataaagtattcaaaggaacattaccaattaaaaatacaataattaatattcccagtgataaaacaatcgaactaacaaacacccaaattaaactacctataaatttagccccaaccaatttttcagtacttacaggcaacgtcaaggttaaataaccaggtcgcttatacattgaacgattaaaatttgtaataacattgaccaaaactgcaattgatatacctaacattgcaaaaatcatcaatgaactcaatacttgactaataaaatctggcaacaacggtgccaaaacacataaaatcaaaaatattcctaaagttaaaaagtattgacgatacgattgaatcatctcatattttaataattttaacatctaaatacctccctaaaggcttcatcaattgactgttttctttctaatcttaaatcttctgttgattgatgcaaaacgatttcaccatcttttaaaaacacgacatcatcaaaaatagtttccaaatcactgattaaatgtgttgaaataagtaccagagcatcttcttcataattattcaaaataacatctagaataacttcacgagcagctggatcaacaccagctatcggttcatcaagaatatataatttagctttgcgtgacatcaccaatgatagttggaatttttctttcattcctttagacatctctttaattttcattcccttatctaatttaaaacgattcatcagagtcaaacaattttctttatcaaaatcttcatataaatcactgaaaatacttaagacatctttaatatacatccaatcttgaaaataattctcatccggtaaatatgaaataatttttcgtgaatcaattcctacatttttcccatcgactaatacttcaccttcataatctttcaataacccattaataattttaatcaatgttgtttttcctgatccattaggacctaataaaccaattattttaccagagtctaatgtcatcgaaacattgtttaaagccttaaaatgatgatattttttggttacattagtaatctttaatagttcactcataactctcctcctactgtattaatacactaatacagtaacactcatttatagtattgtcaatacaattattcttatgactcaaaacaaaataaaaagatttttctagttatttacatagaaaaatctttttatttattttttcacaaattcattataaagaagttcatgaataaaagaatatcccttttctaattttttctttagatgaagatatttaccaatacttttatcatcattgatttccaactgtttacaaacatttagaaatttatcatagtcttcaacatataattgatcaaccatgttttcaacatattgttttttaattcgttcattgcgtgttaagccatattctttgattaaaccctcatcatacatgtgataattgatctttactatcggtaatttttttaattcatgattaattaatgttcgctgtttcatcatcgttaatgaacgataaactaatttaccattattatttatttctacgactacactatatttcccatcaccaacaataaagatgttattaaaatattgactatcataaatattgatacagccataaataaaatcatgcaaagtcttctcatcaacatgataaatatctactcttgaaatgatttctagatcatcatcttcatcccattcatatggttctaataattcttcatcttctttaacccagtttacaattatatctttcatatcttcctcccatataaatatatgattattttataaaatcatgtttttagtatatttttatttttaattaatatataatgattcctgaggtgaaaacatggaattaattaaaaatatcatcatttatggtattcttggagcgattcaaggttttagtgaaccaattcccatatcaagtagcggccatttagttatttttcaaagtatttttgaaaaaatgggactaatggttcctcaaatgaacgatgttacttttgaagtaatcgtcaatactggatcactactcgcgatcatgtattattatcgccacgatattgttagattattcacagctttctttggctatattcgaaaaccaaaaaaaagaaactattacgaaggtgattttagatactgtattttattgattgttgcaactattccggcagcaattggaggatatttatttaatgataaaattgaagcagctttttctaaccctaaattagttggatgcatgttactggttacagcgattttcttattatcaatccataaatttggctacaaaggaaaacggacagcaaaaaaattaaacttattcgacgctttaagaatggggatttttcagttatttgcattacttccaggaatctctcgtagtggttctaccctaacaggaggaatgttagggggattatcacaaaaggccgctcgtgatttttcattttttatgttcatgcctgttagttttggagcaattattttaaaactaaaagactttttaacatccagcacacttggtgctttatggcttccttatttagttgcttttattataagtggaatcgttacatatttggctctacacttattatttaaattactagataaaaagaaattaaatgtcttttctttatattgtttagtagttggtattttagccgtattatttttgtaaaacagtttaaaatgaaatgtctctccattaaagttcatttcaaaaaactgttttttttactattaattttaattatatctgtaatattcatttctttaccatcaattttgattatttttttgtatagatcaaaggctgtaagtatatccttgagaattgcataattatcttgagcataataagcagtttcgatcatttattcacttctaagctacctaatcttccagtccaactcttctattgcatcaagagcaagctttttcgttcgataatgacccacaatttagccctgaacaattctttaaatccttttagtggatcataagataaaattattttacacgttcggccttttcatcacattgaactattctctttccaacatgctaaaaaccagttaatagctgatgatgaagttacaataaaaaaataccattgatttactttaatcacaagtaattcgatggttattgataaatactttgatcctcaccaaatcctagaattaccaataaagataattggcaaagttatttttactaaaaactattattaagtaagaattccatctctcactttttaatttgaacaattgcacaagctccattttcgttatttaataattttagaataccgccatgtttttcacaaaggatcttactaatcgataatccaattccaaaacttcctttattagtctgtgatgaataaaataatgtagttgcattttctaaatcctttttactaaaacccggcccatcatcctgaataacaaattcaagataacccacagtttccataatcgttaacttaaccccattattagcaaagcggaaagcgttatttaacaaattttctaatattttaaaaataatctgtttatcaagatataattgtttagacactatttttgcttccaatactaaatctttatgattattcttagcaataatcataaaatcattattaatttcttctagaaaatctttgccgacaaccattgtcttactaatttcaatatcttctattttttggatatcttgaatacattcaacatatcgctctaaacgagctgatgaatgagccatactttttaaggtcgttaataaaacatcatcagatactctcttttctggaagattttttaataaataatcaaggtatcccttcaatactgtaatcggggttcttaaatcatgtgatactgatgccgttaaagcttttcgctgatctaaaagttcccatactttttggttattttcaatcagttcattacgcattacctctaaagtactacataaccgacctaattcatcattagaattataagttatttgaaaatcaagattattattggttaaattagcgattcctatatttaattgttcaatcggcaacgccagttttaaacgatagtatatctttacaataaagattgtccctaaaacaagatataatgttggtaatgcgatcatcgctactgtcgcactaagataaataaatttatcttgattagccaattcactatactgatactcatcgtttgagggcgagatttcatacgtacctgtaatattttcactaataatagcggtatctactgcaatatgaatagtccgattatcaagaatcatttgtcgtaatgatgaagtcaacaaaactgttgtagaagacaaaataataattaaaaataaagctacacttaatattaataataatgatttttttaaagacatgttataaaattgctgttttattttttccatcgataccctacgccccacactgtttctaagtattcattttcactataccgggctaatttcattcggattttacgaatatgttctttaattacagcactatcaccattagcttcaaagccccatactacttcataaattttttcacgatcaaatatttgaccagcattcatagataataatttaataatttcaaactccttattagaaaaatcaatttttttatttttaataattacggttctttgactataatcaataatcagttccctagtaaaatgtcctcgtgatttatgggagctgcgtttttcacgacgtaaatgagcttgaactcttgcgaaaagttcatccatcgaaaatggttttgtaatataatcatcgcctcccagcattaaaccattgatcatatcccgactagaaattcgcgctgttaaaaatataatcgggcaattcacatgttcccgaatcatcgtacataattctaaaccattcatctccggcatattgatatctaataaaataaggtcaggtaaaactgataattgttttaaagcttcattagcatcattagctaaataaactaaatatccttcagattgaaattgtaatgccagcatttctaaaatgtctctttcatcatcaatcataagaatcttatacattgttttttccccctatagttatttttattatacttaagtttgtcaatttttggtcaacttcataaaaaaacttaagtattatgcatcaacctgcaatcgttagatttttaaggttcaatacaataacttaagctcttttataattatttagttgcaataacttctacttcaattaaagcccctttaggtaatttagctacttctacagcactacgagctgggaatggttcaacaaaatattgagcataaatgtcatttacagtaacaaaatcatccatattatctaaaaatacagttgttttaataacatttgcaaatgttaaaccttggctttctaataatccttgaacattctttaatgattgatgagcttgtgcttcaatcccttcaggcatttcccctgtttctggtactaatggaatttgtcctgaaaagaaatacatatcaccaacattaattccttggctatatggcccgatagctccaggtgctttatctgtttttactacatttttcatctttaatatcctccttaaatcattataaacaaataatcactatttttaaagttttattaattaaaatattgccatttttatcactatgataatttattattgacttattacaattctttgctataatgttgacaatacaaaaggaggatagcacgactatgaaatatacatttgcagctagatttaataacattactccaagtggtattcgcgctgtactagaaaaagcagcgggacccgatatgatcaacttctcaccgggctttcctgataacgatgcttttccagctaatgatattcaaaagatttcacaagatgttcttaaggaagatatttatactatcttgcaatattccagaggtaccacttatccaccattaaaaaaggcattaaaagctttctttaatcgtcaagaaaaaatttttacagaaaatgatgatctaatggttacttccggctcaggagaaggactggaaatggctgccaaagtatttttaaacccaggagaaagtatcattgtcgaagatcctacatttgtcggagcgctgaatggatttattagcaatgatgctaaactgcttggtgtgcctgttgaaagtgatggaatgaatttaggattattagaagaagcaatgcaaagcactcctgcccccaaactactatatattattcctactttccaaaatcctacctgtatcactacttcactagaaaaaagaagagctatatatgacttatgtttaaagtataatatcatcattcttgaagataatccatatggcacattgcgttttaaaggtaaaaccatcccgactttaaaatcaatcgatactgaaggaatcgttgtttactgtgcaagcctatcaaaaatcatttctccgggtatccggcttggaacaataattgcgaataaagaaattattgataaatttaatattcttaaaggggctagtgctggagccgtaactaattggtcacaacatgtaattgcacgctttttagaaacagttgatatggataagcatcttgctcatttacaatctgtatatggcaagaaaagtacatttatggttgaaatgatgaaaaaaacttttcatcctgatgtaaaattcactaccccagaaggtggtatgttcgtatggtttgaacttccaaaatatgctgatgctaggacttttttgaatagagctaccactatgcatatcgcaattgtaaatgaggaaacttttgccgttaacagacgtgataaaatgaatggttttagattatcttttactagtgcaacaatggagcaaatagaaacaggtattgctaagttaggtaaactaacatatgaattatgtaaataaatccactgattggtggatttttatttgttcgcgcgtataattgaaatgaggtgactaaaaatgaaacgtggattagttttagcaggcggaggttctaagggagcttatcaagccggctgtattaaagcattaaaagaattgggctatgattttgatctagtaaccggaacttcgattggagctctcaatggcctattagtcgttcaagaagattataacactctttatcgattatgggatgaaatcacaattagtgaagttttagaggatcctgtcaattttaatttttcaattgactcaatgctttcacaaaccaatttaatcaaacctttttttaaatcatatatcaatgaaaaaggtgctgatatcactcctttaaaaaacattctccatgctctttataatgaagaaaaagcctttaataataaaatagattatggtgttgtagctgtaaaatatcctaaattgactcctatcgaaataactaaagaagaaatgaagcctgtaccagccattgaatatgcaattgcttcagcttcatgttttcccgcttttccagtgcatcatattgataaacaaggttatatcgatggtggttattatgataatcttcctatttcgctagcgttaaaaatgggtgctgataaaattattgcaattgaattaaatcaagatgctactcatgattatttcctcgatcgtcctgatatcatatttattcgtcctagctatgatcttggcggatttcttgattttggtcgcgaaattcttgattggcggattaaacttggctatcacgatactttaaaaaaatttaaccagctaaaaggctatcgttataactttaaaaattttgaaatcaatcacgaattagcccataaattctatcgtttaattttaaactatgaagatagcataaataaaaatgttgttagtaaaacaattaccagcagttcaactcccttgagtgatctgctaaagaataatacttatttaaaggaactaacaaccgaagattactttgttcgagcggttgaaatcactatggatcattatcactatcaaagtgatcttctttatgatctaaatgaagtgtgtcacgaaatatttaacacttttaaagaagaatatcaggaacgctatgatattttagaaaaacggtttgtcgacatacctattaaagaactcttctccaaaataaaaaaattaagcagtaaagatgctatttgtgctttttatcactcattaaataataacgaagaaatcgaaacaactttaattagtaatatttttttagaagaatatttaatcgctttactactatatacgcttgtataattaactaaagtttgctagaatcctcctaggaggaattagtttgaatctcaaagtaaaaaacatgatatattgttcaatgtttgcatgtatcactgcaatcttggcacaaattcgatttaccttaccaagtctagtcccaatcactttacaaacactcgggatttatttaattggtctggtgttaaaacctaaaatagctttcattagttccttgatatatattttaatgggagccatcggcctgcctgtctatagcggctttagtgccggtttaagtactatattaggaccaactggtggctatatatttagttttccaattacagctttaataatcagttaccttgtccattatcgaagtaccactatttttaagtttggcgctttaatactcggaacaataatttgttatttaattggaactttatggtttatgtatataatgaagatgagttttagtgcttcattaattatttgcgtcctgccttttttacctggtgatgtacttaaaatctttattgcagcagccttaacaaataaatttaagaatataataaaagattagggaatttgctttcctaatctttttttcattttatgcttttgtttcttttcctaaacgtttatacgtttgataaaataatgtggctgtaacactaactgcaatcgtatcagcgattggctctgctaaaaatactgcaaatgcttgattttctataaacattggtaaaataaaaatcaatggtattaaaactaaaacctttcttagaacggctaaaaatactgatgttttagcatttccaatagcaatgaaagtttgttgacaagcaatctgaattccaaaaattcctgaagcggccatataaatacgaatcgcccaacgtgtatacgtcgccagttctccatgacttgtgaaaatataaataaaagtatctggtataaacatcgctactgcccataagagcattgaataagataatgagatttttaataaaagtttaaaagcgcgctttactcgatcaatattttcagcaccataattaaaactaataattggctgagctccttgagtaagcccttgtaacggtaacattgaaaactgcatcacgctagtcaaaatagtcattgaacctaccgcgatatctccaccatattttaataatgaagtattaaaacatactgagatgacactttctgtaaactgcataataaacggtgatagccctaatgctaaacatggtaagatgacttgaaaatctaattttaaattatctaattttattcttaagccgctacgcttacttgttaaaaaataaacaacaaagatagaagatatcgcttgagaaataatagttgctaaagcagcaccctttacccccattgacatactaaaaataaaaattggatcaagcacaatattgcataaagctccaattgcaactgtaatcatcccaatcttagcatacccttgagcattaataaacgcatttaaccccaaagccaattgaacaaaaattgtacctaaggcataaattctcatataatcaagcgcataaccaatagttgcttcactagctccaaagaccattaaaatcggttcaccccagattaaaaaaacagctgtcaagataattgccataattactaacatcacagtacagttaccaagaatcttttcagcttttgggtgttcaccacggcctaacatgattgatgctcggggagcacctcccatactaactaaagcggcaaatgctgaaatagccataataacaggcattgttactccaacccccgttaatgcactaggccctactttggggatatgtccaatatacatgcggtcaaccatattatataacacatttattatttgtgctaaaatagcgggtaaagctaattttaataataatggacctaagctatctttacctaaatcagcctcttttttctttttcactttaattactcccttcatctattttaaatatccaatgagtaattataacaaatttcaaagataattcaattctttaaaagattatctaatttacatcattttaaatactcattcatatatcaacatattgatatatattttttcaattattaaaaaacttggcagaattatcatttcttttttattcatattctctttgataataataatatttgtataacttgttgaattaagctattttggcttaataaacaaaaaatcatacttataatttataagaaatcattgatttatgaaattttgctaaacattataaatcttattcataattttgtttcaataaaaagatgataaaaaataagaaccatggggtaatggttcttatttctttacatctctaaatgagattacttctatttcattatcacgaagccactgttttaacttttcacttgttacgagtgaataatcatataatctttcttttaacatcgaagaagtagtcgccacatcataatcaataaaaccaggatgtgttactaaaatattcaaaccttctttaatttgataataaccatcaatgaacatattttcaaagtcatgatcatgttcttcataataatcatattgtttcattgtctgatcaataatcccctgctccaagtccattccgtaataacatactggaacattatattcatgataaattcttaccactgcattaatcaatggttctacttctaaaacgtgtaaatcaatgtactcaggcaattggccaactaattcaatatatttttcaatttgatacttagcttcgatgtaagcatcttcctcactaaataatggttcattattttttatttgtgctcgacgaatcgtactcgataaaaatatcccgtgttcatcaactagactaggaatcatctcttttggtgctaatgcatatccattagttacattaacatgtaatcctaaacacagatttggacactgctttgctaatttaattgcttcttttgcatacggcatattaaccatcaaagcaacactatttaccaatccctttcgatgtgctgaaatcatccccaatgtcactgcttcgctatatcctaaatcatcaccacgtatcaataactgctttaccataattatcctcttttctatattttatataattatactataccaaataaatagtctatacaatttattttttcatattcatgaaacatttatgatagtgcttatatttgcggtataataaaagataactaagggaggacaacacactatatgaaagatcgttttagtttatcatttaaagctttttatttaatctatttgggcgcgattggctcttttattccctacattaatacttatttagaaaaaaatgccggcttaagcggttcacaaattggcttaattacagccatcagtcttgttttaggggtatgcgtgattcctatttggggggtcgttggtgataagaccagaaaatatagtgcactattaaagttatcaattatggctgcactagtagtactttacttctattataaagccgctgtttatcctgctatcgtagtttgtgcaatcgcacttgaagtatcacgactaggaacaatgccgatggccgacacgctggcaactaattactgccataaaactggtggtaactatggttctattagaggaatgggctcattagggtatatgctggcaggaatggctgtaggatttttagctgatctttttggtcttgatggagcaatgtttgcaacatatgccgttttattaatcttggctttctcgatttcctttggctttcctaaagatgatggaaagaaagaagatggtgaagaagttaaagtaaaaaaagggagctttaaagaacttctaactaataaaaacttcttatttattctatttttacaactattaatgtcaacagttgtcgattctgctatgacatatggcggaaatcacttaactgttactttaaatagtggtgcctcagcaataagctggatgacttttgcaacagttttacccgaagttgcattcttgatgattgcaatcaaagttcttaataaaaccggctttaaaaaattctatttgattgcctgtgtatcaatgatgcttcgctttggggtatatgcttttattcccaatcaatatgcttttttagcaataagcatcgtacattgcatcggcgttgccatcgcaactgtagcaagtttaacctatattcgaaattccgttgatcccgcagttttaggaaccgctattacattacttaatgcgacactatcaattggtaaagccatttatggttatatttttggagtagtttatgaaatttggggaagttttataatgttcggaatttgtttgattccttttgtcattgctttcttaatgatttctcgttctcattgttttgatgaaatcgataaacataaaggtcatattgcataagtttatggatagatagttatatgctatctatccatttttagattaaattaaaatattttcttttaaataatataatttatattataatgatattcatggagaagtttatgaagaatatcacaaaaatgtttttatttatattatcgttctacttagtcttaggttccctttggattggaaaagatgttatcattcattatcaaaatattgatggtttaccaatcctaggttatcatggtgtcctcgaagataaagataaagaaaaatactttgctaattatccatactgtatgtcattgagtgaatttgaagctcagatgaagtatttaaatcaaaataattatcataccttaacaatggatgaaatcaacgattattatcaaaatcatacaccactacccaaaaaaagtgttgctcttacctttgatgatggcttattaaactttaaaacagttgttaaacctattttagaaaaatataattttaaagctacttgttttgttattggctataaaactacagtaaaaaatagccaaaacccttataagcatcaatacttaagaaaaagtgatttagtaaatgacgaatatgttgaatactattcacattcttataatcttcatcataacactaaatatcctaataccaaactaattgaaacattatccacacaagaaataatcaatgattttaaacaaaatgaaaatattgtttctagtaaatactttgcctttccatatggtcgaacatgtgacaatgctaatgaagcattgataaaagctaatgtttcattagcttttggttataaccaaaatagaacgatgacctatcatgatgataagtacttgttaccacgatatctaatgtttagtaaaatgccaatgttctattttaaatggatcgttgaataaaaaatgacaaggactgtttgttcttgtcatttttataattattataagacttttccattactagcaataaccttttgataccaataaaaactatcttttaaatatctctttccacttccatttccataatcatcgtagtcaacataaatataaccatatcgcttattcatctctgaagtacctgcacttatcatatcaattggtgaccagctcaaatatcctaagcatatgactccatccaactcaattgccttctttaactcattaatatgtttttgaagatacttaattcgatattcatcatgaatctgattgtctacagtcaaaatatcattagcaccaaaaccattttcactaatcaaaataggtaaattataacggtagtatatctcattcattgtaattcttaaaccaattggatcaatagcccaaccccaatctgatttttccaaatatggattttcaacaccaccttttaaattaccttcccctacttttctagcagggtcatgagatgctactaatgataaataataactaaaagatatgtaatcaactgtattatttttgattatgtctaattcttcttttgagaaatttaaatgaatatctcttttttctaaattttttaaataccagttaggataattcccattagcctgaacatctgcgtataaataatattcttgatttgctctcattgctttaagaatatcatccggatcacagcttgctggataagttgtaaatgaagcgatcatacaacccattttagcagttttatcaattctttttagctctctagttactaatgcacttgctaaaaactggttatacagtccctgatgcactcgtgtttcatatgattgatcttgactaaagggaactgctgaacctttaaatggtatttctaatgccgcattgatctcgttaaatgacatccaatattttattcgtcctttaaaatgtgtaaaaactgtataacaatatgtttgaaaaaatttaatgacttctttattacaccagccaccatattcagtcgcaataactagtggtgtttcaaagtgagataaagttataatcggttcaattttatatttaagtaattcattaataatattgtcataaaatttcagtcctgctttattgggttctttctcgtcccctcgtgggaaaatcctcgaccagctaaatgacattctaaaagctttaattcccattttagccagtaaagcaatatcctcttgataatgatgataaaaatcattccctcttcttttgggaaaattattacttttattttctttaagttttttaatttcttcaatggttaattcctttttagctaaatgacgttccttcttttcataaaacataaaaacatcggctattgacattccacgcccatcaaggtcatatccaccttccatttgattggcagcacttgcaccaccccacagaaaatctttatctaattcacacataccgaacatcctttcctttctctattattgatttatgatctcttactccaatcgcaaaatatcatcattatttactactgtattcatatttaacagctcgactttattataatgattagtatttgttacaataacaataatagttggatcatatcccgcatggttgatttcatcaatgttaaaatctagtaataattgtcctttcttgaccatatcaccttcttttacaaaagcataaaaaccttttccctccattttaactgtatcaattcctacatgtaataatatttctgctcctaatattgaccttaacccaattgcatgattagtcggaaatacagcaacgatcttagcatcacagggagcatataatttcccttcatcaggaataatagcaaccccatttcctaatgctaacgaactaaaagtactgtcatttactatttctaacggcaatactttaccagtccctacagcacctaatatctcagtatcaacctcaagcagttgatcagtttccttgattacatcatcatttttttcaataaattcatctttccaaaataataatactaatactaaagttccaataaatgaaattaataaaccggcaatataccatacaaacccatgttcagcaaacaatggtaatgataaaattccacctgctggcaaccccgtcgtatagcatccagccccaccaacaactgcacccccgaaaccactcattagacatgccatgaaaaaagcttttttagccttcaaagtagttccataaatcagtggttctgtaattcctaaaactgagggaattacatttgctgctgcaaccgatttaaaatttttattttttgatttaaaagcaatccctaatgcagcaccagtttgtgcaaatgctgatggcatcgtcattgctaacaatgcatctctaccagttgttgcaagattatttaaattgacaggaataaatccacgatgtaaaccaaaaataactaatggctgccaacatgcacaaaatataaatccaaaaataatcggattgaaactataaactgctaataatccatctgtaaaaatatttgttaaaaatgtcactactggtccaattgctaataatgataatggggccataataactaaatcaatcaatggagtaacaaaacttctaattattgaaggcagtctatcacgaatcagcctatccaataatgatacagcatatactgcaacaataatcggtactacagaagatgcatatttaattaaaattacatcaagtcctaagaaagataactttgcaccttcactaaaagctgtcaataaggttggatataacattgttccagctaaagtgactcctataaattcatctattttaaagtagcgtgatgcactaatcgctaaatagaacggcataaaatacaagattgcatctgcggcagcatataaaatcatatatgttccactttcagttgttaatattcccatactagtaaatatggttaacaatcccctcaatacacctgctcctgccataacaggaacaaatggtgtaaatatgcctgaaaataatgcaaatattttatccaataatttcttatttttatttgattgttcctttacagtacttattttagctgttgccaagattgctttatatacatcagcaacatgggtaccaataaccacttgacactgtccacccgaaaataacacttgaagaatttctgaactattttctaagtttactttatttactttctcctcatcttttaattcaaatcttaacctagtagcacaatgctgtactatatttatatttttttcgccaccaacattttttataataaatcttgctaatttttcatatttcatttttttctcctcctaataaaataacctagaataaaacatgtattcaatcatgtttttattctaggtttagcttgccaaagcaataacaatcctaatattttaatcttgcaatatgcaaagttaaatacaatttttccgcctgacttaaatcttttttataaattttttgaacatgtttttctatattttttacacattcaaatgcttctggatatctttcaataacgatgtcaaataatatatcatctcttttagcttctttttcaccaaacatcagccgctttgcaaaaaactttaaatgtgtcacaaaacgatgatagtctagagaatcctcatcaaatgatatcttcaaatgatatctcacaatattaagtatttcttgaataattttggtaatttgagttacttcttccatttcactattaagttcagcattgacaaaatgtagagcaataaaaccaacttcatcttctgataaattaaccattaatttttggttaattattttcaaagcttctgctgcgatcttatattcctcttgataaaattgcctaatctcccataaaagcggattttgaacattaattccttgtaaatatctctctatagcatagtttatatgatcagtaagagttatatatattccatcattcaactctttatccaatcctttccgtgcaaaatcaataatttcatcagtaacattaagaacattgactggaatatccttaatcaattcaaggaagcgattgttttgtttatcattttttaaataaaattgtttttcaatcatttcatctagaacaacttctccccgtgatttttgatatgcaatacctcttcccataagaataatttcattatgattttcgtcaagtgagcttacaatattattattaataattttatgaattatcataagacacctccttttttgcatagaaaaagccaaactcaaataatatatataagaaatatatatccatcaaagtttagcctaattgaatagtaacaatctttgtaattttatgatagcacttccaaaattaattgtcaattaccaatcatatatatcaaaaattagttgttaattccttgatgcggcacaaacgaactatctgtaattgcctcaaagcgataaccacgtgctttataattttcaattattgccggtagagcctgaacagttgttgatttggcagctgtatcatgaaataaaatattaatgttatttgctttgcttgatgtagcattagcaattaacttgctgactgctacattatttcctgaagcatctgtagaatcgccattccaatcataatattgataaccgcgattgattaattcccttgacaatacagtcataatacctggacaatatttacgtgataccgtatttgaagaacctccaggaaagcgtacatatttgggtacaaacccaattatatccttcaccatattaccgacttttgttaaatcgtcaaaataagcttctggtgaagcataaacagttttatagtcatgactatatgtatgcaacgctattgtatgtcctttatcatgagcagttttaattaaatgattataaggtttattattcccagtaacaaagaatgtcgcctttgctccataaacatctaaaatatctaaaatcttttgggtattagctgatggaccatcatcaaaagttaaataaacgattttatcacttgtttgattattgcttccaattgctttcttttcaactactttaatttcacgctgcttttctattttgtttccagaacgatctatccctatataaataagtgtataagtcccctctttttgaatattcacattactagaatcaaccgttaattttggttcgggatcacggttatcactaatgctgacaccactattataatctgtttttgcccctatcacgatcgtcaaaggctctaaccctgtaatttggggtggctcactatctttagtaaccttgacttttcccttcttttcagttacattatttcctttatccttaacctgaataattacttcaacagttccctctttactaaaatcataatcttctttaaaagaaacttcagtttttgttgcatcattaatatttgttgccatacttgcaggatcaactttcattcctaaatcaatatcaagatcaacaacatcaaactgtggttttttagtatcaactatctcgatcgttgcttcatattttttatctttatatatatagattactggatatcttcccaacttattataatctattttagaaatatcagcctttacatctttaatatttccattgcgtacgcttgcgatatttttcatcacatcataactatcattaatctcgactttgataatatccgctttaaagactatcggtgagcgggttaaaaaatatgttgctactccaccaactattatgactagtaatactgatacaattacaatcttatttcctatagttaaatttttaatttttttcattatatctttcccttaactaatttatatacttttagtatatgtcaaacctcagtattttacaatctttgtcaataaaactatttataaaaatcaactaaataaaaaatacttatctataatcagataagtatttaatcattattaatcaataatagcacggacattaataattccatttgccgactcaatccgctcaataatatcaggtcgaacttcatcatttgtatcaattagtgtatatgcatattcaccacgagagcgattaaccatattttcaatattcaaattatgatcagcaaataatttagaaatatttgctaaaatattaggaacatttttattaataatacataatcttgttttagacattcttgcttgattgactcctgggaagtttactgaattaataatatttccgttttctaaatattcacaaacttcttcaaccgccatctttgcacaattatcttctgattctggtgtacttgcacccaaatgtggaagaataataatattttcttgtccaattaattctggtgcagcgaaatcactaatatatttattaattttaccgcttgcaacattagctaataaatcttcattattaactaaatcaccacgagcaaaatttaaaattctgacaccggttttcatctgtgcaaatgcttctttgttcatgaaaccttttgtttctttagtactaggtacatggattgtaatatagtcacattcttgataaatttcttctaaagaagctgcatgacgagcatgcttagataaagcccaggccgcatttacgccaatatacggatcataaccttttactttcattcctaatttaatagctgcattggcaacatttactccaatagcacctaagccaattactcctaaagtttttccttcaatttctggtccaacaaaattacttttacctttttctgctgttttagcaatatcctgatcgtcttttagaccatcaatccaacgaatactttcaacaatttttcttgaagagagaaataatccacataatacaagttctttaacagcgttagcatttgctcccggtgtattaaatacaacaattcctttttcactacaatcatcaagtggaatattatttactcctgctcctgctcttgcaatagcttttagattttccccaaaatcatattcatgtaaagaagctgatctaaccaaaatagcatcttcattagtcatttcttcgctataagcataattttcatcaaatccatctaatcctactttagatattttatttaataattttatgttatacataattattctcctatttgtttgctgcttcaaaatctctcatgaaagcaactaatttttcaacaccttctaatggcatagcattatagatagatgctctaattcccccaactgaacggtgaccttttaaattagtcatacccgcggcaatactttccttaacaaacttagcatcaagatctttgtttggtgtagtaaaagtaacattcattaaagaacgattatctttatcactatgtgcgatatagaaatcactactatcaagataatcataaagaagattagcttttttaatatttctttcttgcataacttcaagtccacccatactatcgatccattccaaaactagtcctaatacataaatcgcataagccggcggagtattatacattgaatcattttcaatcatcaatttataatctaataatactggtgttgtcgcagcaactttttgtaataaatcttctttaataattgctactcctaatccagcgatccccatatttttttgtgcacctgcataaatcattccaaactttgaaacatccactggttttgataaaatatttgatgacatatccgcaattacaggaacaccattagtttctggaatatatttccattcagttccgtaaattgtattatttgcacataaatgaacataagatgcttcaggatctaatttcaattcgtcttgagttggaatatgtttaaaattgttttcacttccgtcataagcaatattagtttccccaaatttttttgcttcggctgcagcttttttactaaaagctccagttacaacataatcagctttaccattttttaataagtttaatggaaccattgaaaattgttgtgttgctcccccttggataaacacaattttgtaatcatcagggatattcattactttctttaataacccttttgttttttcaaaaatgtctaagtaggaagaggatctatgactcatctccataacactcatcccactattttcatagttcaacatttgtttagcagctttttctaaaactggctcaggcaacattgaaggacctgcagaaaaattcagtactctcttttcagtcatatatatacctttcctttcttgtatgtgaagtctattatattgtatacaatctaatttgtaaagggattttgtaaaaaattgtatacaattatacattgtttcataaaaaagctatttttcttagtaattatcagtttcattatatgctggaacatttgataaattcacgatattttaactacatttacgataaaataaattgaattaaatacatttctaagatatgatgaaaaggtacatataggagagaaaaaatgaaaagaaaaaaactaaaattgaaaaaacaagcttactttgttattggtggcctcgtcatcctagctgcccttatactataccttattttatgtttagtaacagggggagacaattttgtttcaaatacaactatcaatggtattaaagttggtaatatgaataaagaagaagcacgtaaggctatagaacaacaatatcaaaatgatttaaatccccctactttaactttattactcgatcaacaagaatacccagttgatttaactgataatcttacattcgatagtaaaaaagctgtagataaaatttctaaacagtctaatagttcattcttcagacgaggatataactatttgtttaatcatgattatacagttggggtaaaaataaaaaataaagatcttttaaatgaaaaaattactaatagtcaaattctaaattatagtactttgactcctactaactatgaacttaaagatgataaaattattttcactaaaggaaaatccggtaaaacagcagaattagaatcagttttcaatacaattaataaggcattaaataattatgattttaaagggaaaattaaatattctccagtagaacataaacttaatgatgaagaaataaaactaattcatgaaaatttatcaaaggaagctaaaaatgctactctagataaaaataacaattatgaaatcatcgatagccaagtaggtgctaaatttgatttagaagatgctgttgctaaatacaataaaactactgaaggtaaacagtttaccctaaatgctacgatcattaaacctgaaataaccaaagaaatgttagaacaaaatttatttaaagatgttttaggtgaatatgcgactaacgtcagcggtacttcagttcgtaaaaataatgttaaactttctggtgataaatgcaatggagttattttattgccaggtgaggaattctcttataataatgttgttggcaaaagaacgaaagaaaatggtttcggtgaagctgcagcctatttaaatggagagactgtgcaagaagttggaggtggaatctgtcagacatcatcaactttgtataatgctgtattgtacgctaatctaaagattactgagcggactaatcatacttttgtttctggctatgttccaatcggtcgtgatgctacagtatcttggggtggccctgattttaaatttaaaaatgaccaggcttatcctattaagatcatcgcttcttatgaaaatagtcgtctaacaactaaaattttaggtactaatgttaataatattcgtgttgagctaaaaagtcaaaaacttgcttcaactaattataatactaaatatgaagacgatcctacattacccgaaggacagacaaaagtaaaacaaaaaggaactccaggtagtaaagcaaaatcatggcgttatgtttatgatgctaatggcaatttaatttcatcaaatgaagaagcatatagtgtatataaaggacatgaggaaattattttaagaggtactatgaaaataactgaaccagctacgcctgcaccaactgaacctacaactccagcacaaccagaaacgcctaccattcccaataatgaaacatcgtagaatcttaaattaaatactggtggaattttttcacctttttctataattaaaaagattattacataaaataataatctttttaattattttatttttgtgcaatcttccacttttttaaacaatactgatatatctcttgttctgaaatcattaacgaagcactggctagatttatttccatattcttaccattcttttcaagaattatcagaaaataaaaaggctcatggtgcagctgaatttccgcaaccttctgccataaaatcacttttttccatagcctataagaagtgataccatctttatcaattacaaactttttcattccaaaaaatatcaattctaataattcaatagttccaactattacaattaccaaagaaaagaactctagcaccccaaatataaataaacaaaatatcatgatagctgatgatacattcgaaataaatcctgaagctactattggaatgcttatcataattaatgaaaatggaattatggataaaataagaatagttgttaaaatcatatcttttctaataataattctttccacttcttttatcctttccaccattcaagtcattacattaaaacatactttattttctgtaaacttgaaaataattaaatattgtttacgaatacaaatatcagggtttgtattcgagtgttttgtaatataaagtatttctttttaggaagcaaagtagactttttctcacatagaatatataattaaataaacaaacttaaataagatattttcttaattttcacaaatattatgattgaaaaaaacaggaaaaaaggtctacattttttcctgtttttacttaaataactttatttatattgattcataatcctttacccatctagtaaaggtatgattatttgtacttaaacgacgcgaagcttcagctttgctgattacattttttcgccataaataataaatttcttcaaaatcgtcgggaatcgttaattttggtcttccaaatcgtacgcctctacgtttagcttcacgaattccctcggcttgtctttgacgtgtattttcgcgttctatttgagcaacataagaaagcacttgcaatactaagtctgcaataaatttacccgtaattccatcatgcttttcacgtgtatctaataaaggaaaatcaattaccacaatatctactccgattttcttgacaatataacgccactgttcaatgatttcatcataatcacgtccaagacgatcaattgatttaatgtataaaatatctccctgttttaaaacctgaagaagtttttgataatgaggacgattaaaatctttaccggactgataatcaatataaagctggctccctgtaagtccaacctcttttaaagctgtaatctgcctatcaacattttggtctttacttgatacccgtatatatccatatttgttatattccattctatattttcctcctcgagtaaaaattatggcatagggaaagttagaatgctataaatggctaattatttagggattctttgcatcttacatcgtcagcagtgataaatccatttttataatcgtaatacgataaaattaaaacagaaacaataatcaacaaattatcgcttctgtttaactaataaaatttaatttataattataacatcgtcttttcataaatatcagcaatgttagttccaacatgatctggttgatgagcatcacttgctgtaatcatcaatactccatgttcttttaatatctttaacaattcttcgcttaatcccatatctttatgattataacgataataacatcctgtattattttcagcttttacattatgttcaaccaacaaatcagctaactgatgataagttggtgttaaatcataggttggataataattaaacatttttattgtatctggatgtgctaattgcgtaaataaatcagacttaaccaatgaaaaaatcaattcataataatcacgataaatatcatcaacatcaaatttattccataaaatatctttagagaaattcatgtcatataatctgccattaattgagtgtattgccccaacaacaaaatcataattatggttagctaatacttctccaatcttcttttcatgtttaggcacgtagcatacttctaaaccaaatgtaacttcaatcggcaaatctaatgctttaacttcctcaattaatttatcataatcatctaaagtatccttaaatttcattgctttattctctagccattttttttgcaatggctcttcttttaattctgtataaatctcttcaaactctttaaaacgatgtgtgtgatctaaaatttgaatctttgtcaaaccttttttaacagctgcatcaacaaactttaatacatattctttatttagatccccatattctaaatgcatatgtccgtcaatcatctttatcaccccttctttttttatgattatatgcaattcttaaaaaaaagtacagtaataaaataaaaaaaggagccaggggagactccttataggatggatgagtttttgggagagggaatcatccatcatttaagttgtaaaatatatatgaggggattaatatattttacatattattatggtttgtctttcgacactattatcctagcaccgctctatgaattaaatgtgaaccgtataattttttaaaataaaaaaggagccaggggagactccttataggatggatgagtttttgggagagggaatcatccatcattcaggttgtaaaacatatatgaggggattaatatattttacatattattatggtttgtctttcgacactattatcctagcatcactctatgaattaaatgtgaactaatctaaaacaaataattagaaattttatccttcgattatttgatccaaccatgcaccctacaagcattataaattccatcactagtattgcgatcagttatataatccgctttagcttttaattcatcacaggcattacccatcgcaattcgatagaaacgttcatcaaacataacaagatcattataatcatctccaaatactacaacatcatcaatatttccttttatcatcgcaatcatatcaactattccctgctttttatcatctggctgaaacattaaatattcttgttcaaaacgtaatgaacctaacgtatcttttaatgttaatcgtgtttcttcactagctggaatagaaatataaattttataaatattttctaaattatgataatttatttcactatcaattgtataacgtgttggttcttttcgataacctgcttgttttaaaaataacgtatttttactgtatacatcaatactatcaaatggagctattaggattccatagcctaaattttctgcttcatcaataacagccaatgctttttgccgatccaatggtgcattttttactaactgatgatttatgacaagaccattaccaccattacaaaccatattatttaaaccaacttctttaagaaagtttttagctttataataagcgcgtcccgttgcaatagctacaaaattaccattttcttgtaatttatctagggcttcttgggcacttggaacaatttttccagttgtattatccgtcaaagttccatcgatatcaaaaaatatatatttcatatcattcttctccaatttctttaaagaatccataaataacagctccacaaagacttcctgctaataaagcaacaatatatctaaaaggatgcgctattaatggtaatacaaagattccaccatgaggaattctaattccacaattataaagcattgaaaaaccaccagctactgctgaagcaacaatgcaagctaatgttactaagcgggggtctttttgaacaaaaggaattgtcccttcagaaataaacattaagccttttaagtaattttgacaacctagtttacgttcagttaatgtaaatttatttctaaagaaagttgtactaattgcaattgctaatggcggtaccattccgccggccattacagcagccataacatcaaagttaccttcaacaatttgagctattccaaaaagataagcaattttattaactgggccacccatgtcaacagacatcattcccccaacaataactcctaaaattagtttataaacaatatccatactaccaataaatacactaatagtctgatttagacttccaacataaggactaatcaaatatgataaaacacccgtaatcatgaccccaaaaatcggatatattactgttggctttataccatctaaacattctggcaatttacgacaaattttttgtaataaaattacaacatatccaccaataaagcccgctatgattgcacctaaaataccaggactaggcatattttgtagatacatattatttaataacattgcagccccgccagcaagagctactgcaaatccctgctgacttgcaattgcctgaccaataaagccagcaaataaagcaacgatcatcccattaacggttatccccagaatataactgttacttagccaaatactatcataaatttgtttgattccaaataaattataacttgctgctaatgaagcaattgaaatcaatgcacccgatccaataatgattggcaatattttacttaaagcatctgtcaattgggtatataattttcgccaaattccctcattggcagaactactaaccactttatctccttgatgatgataaatttctacattaccatttattgcttgcgacaataactcctctgctttattaattccatcagctactttagttataattacaggccgaccatcaaaacgtgacatctccacttgtttatctgctgccacaataatacatcgtgccttactgatttcttcagccgtaagaacatttttaggccctgttgccccatttgtctctactttaaataatatgttcatttctttagcttttgcttctaaactttctgctgccataaaagtatgagcaattccagtaggacatgcggtaactgctaaaacttcataattaataccgtcagtttcttcttttactttcactatttcattttctttatcatcaattaatcttaaaaattccactgcatcactagcattaattaagttttctttaaaatcattatccattaacatcccggataatcttgctaatgtttccaaatgaatgttaccaccatcaactggtgctgcaatcataaaaaacaaccgtgctggttgactatctaatgattgataatccacaccatctttaactatcattactgctagtccaggtttttttactgctgctacttgggcatgcgggattgcaattccttctccaattcccgttgtactttgagcttcgcgagctaaaataccttttttaaaggctagtttatcactaatatttccagtacccaccattaaatcaactaagtgatcgatcgcttcttctttattagcaacttccccattcatatcaattccctgcagacataataaatctgtaattttcattattcatcctcacttattgtttttaataattcatctattttttcttttgatgccaaatcttcactgaatgcagttgcactaccagtagctgtagcctgttttaaagccgttttgaaatcatttgtcttaatataaccgtaaataaatccagcgaccatactatcacccgctccaactgaatttttaacctcacctttaggagcagatgttatatgtacatcattattttgatcgactaatactgctccatctccagccatcgaaactaacacatttttagctcccattgtttgtaatttcttagcataaacaacgacatcttctttatttttaatttcaacattaaaaatttcagctaattcatgattatttggcttaatcaaaaatggatgatgctttagacagttcatcaataaattattagttgcatcgactacgatcaaaacattttttgattttacatattccataattttttcatatatatcatccggcatactgcctggaatacttccagataaaactagaatatcaccatcttttaaattatctaacttacctaataatgcttgaacttgtgcatctttaatttgtggtcccatcccattaatttcagtttcattatcagatttcatcttcacgttgattcttgataatccggcaacttcaacaaaatcagtttttaatcctttagcttctaatccctctttgattgctttgccagtaaatcctgcgataaatcctaacgccgtacttttttcacctaaagtttttaaaacgttagaaacattaattcctttaccaccaaaaaacatgttttcttgttttgttctattgacaattccggtttcaaaattatctactttaattacataatcaattgctgggtttaacgttactgtatatatcatcttaattttctccttaagttaatttttaatccactcttagtatatacttaggtgtattctccgtcaaattaatgagtcaatatttattttcaaataaagaaatttaatcttataattttaattatttaaacttaataataattttaactccattaacaagcttcttacaaaaacaattgaaatcaccttatatttatgatatcttttatatagttagtcattgctaaccgtgtaaaaggagtgattatatgccatcaactgcattattatttgaatctaaacttgttactttttgtagtcctactttattaaaaatgaaagctggaaatatttttaatattagcaatgagttcaatgaattagaagagtgtttaaattattacaaccaactatgcaatcaaagaggaatatacatttcgattattcatgaaaataataattcaaaaatgatttatgtttatcaaaaagaaaaattaaataacctttttaataaccataaatttagagctgttctaaataattatcattacccttatcaagatatcgacagtctaataaattggctaaagattagaatgaatagtagtgaatttcctcatgaaatcggtttgtttttggggtaccctttgactgatgttaaagggtttatcaacggtgctgattataaatatattggatattggaaagtatatagccatgttccccaaaccctctgtacttttgaccgatataaaaaatgcacacaagaattaaaaagacgtttttgtcaaggagaacgaattgaacaattattagcccatgtttaaaatcataaccatttcaatagcacgtgcctttttatctcataataaaaaagcctgatcataatgatcaccggctttctattatccaattgaagcaactattgtagtaactaaattatcaatatcatccacttgctcagttttcaaagttgacttaattgtgattggttcgttgatgatttccatatccttcatcgtctctaatttagtacgcatgtgttttgcgcataatgctccccatgttccattttctaataacgctacacttcttttctttaatgataaagcaatcatatcactaaggaagttttccattggtggaaaaattccactattatatgttggcgctgctaaaatcaaatgactataatggaacacttcactaattaaattagaaacatgcactttagatacgtcatacattctaacattttttaccccggcttgcttcaattttgaagcaattatttccattacattttcagtattaccatagatcgaaccataagctaaaacaacacctttttcttctggttcatatttagaccaacaatcatatttgctaactatgtaatcaatattattacgccatacaggtccatgaagcggacaaattgtggcaatttctaaactactagctttttttaataacatttgaacttgtggtccatattttccaacgatattagcataatatctcctagcatcatcaagccattcatgttcaaaatcaacttcatcattaaataaagctccgtctaatgctccaaatgttccaaaagcatcagcactatataatgttttatcataactatcgtatgtcaccattacttctggccaatgtacgagtggtgccatcacaaaagtaaaagtgtgttttcctgtagttaaagtatcattctctttaactactaacttattgatctcaatcccaaaaaattgatcaatcattgtaaatgttttagcatttcctacaatcacgacttcaggataacgatttatcacttcttttaaacatgcacaatgatcaggctccatatgattaataacaatataatccaatgttcttccttgcaatgctgtttcaagattatcaaaaaataagtgtccaatcgaccaatcaaccgtatctaataaaatggtcttttcatctaacacaacataagcattatatgaaattccccttggaattggaaaaatattttcaaataaacttaagcgacgatcattcccgccaatccaataaacattctcatttacttctctaatacaattcatcatcacagcctcctaaatcacttttagtataaacctaatattctaattttactaatatgatgcttatattatttccaaaccctaaactattatccctcaaagattagtttagcagctccatattagctaatatctcatttattttttcttcaatttcttcttcacttttaccatctaactgctccaacaattcttgaataaaaggatcattaaatgcctcatcagcagtttcaaggccaaaagcatccattatcgccccttcaatttctagcgttatctcatcttcaaaataatcaatatcatattgactaataaaattcaagactaagaaaagaacatttaaattatttactacgattcgttgtggtttaccataacgattagcatattcaagcaatccatcaattaaagcttcaccaataatttgtaaactaggaaaatcaacttctttaattaaataatcgctttctccggcaattacggcataaacatttaactcattggttttatctgtattagtcattggtaaacagacaacatcaacacataaacgttctgtattttcacgcttagtttcaagctcatgttcacctaaatagccaaaatcatagcgatttaagtcaatttgtggttcatgaacaaaaatagcactctccttaaatttaccatcttcaacatatatttcaataatttcatcagactcactacgattttgatcttctttaatcccatttgcaaattcttttaataattctaaaattacccttgcttcctcaacttctaataagcatggaatatatcccgcttcattacgaaaagcagccaaatagttatcctcatctaatgccacatcaaaatcaagttcctgttcagataataaaatagtccagcagttgcaaaatgcattatttattccttcattagcaagattataaaaaccctctaaaagatcattataagtttcaaataattcaatcacataaccttctaatgtttttaaaataacccaatatgtagtttggttagatactagtttaatcacttgattatcagtaaactcacgtttcttcactaattcttttaactgctctaaaatttcaataaactcattttttaacgggctattatttaatatttcatcaacccctaacaatgataaacaactattaatatcttctagatcaaaattaatatccagatcatctcgacttaatataatttcttgataacgttcaattcccccacaatcctctatcaaattattaccacaaaattcaactacaacaggatagtgctcaacgccctctaactcttgttcaaccgtaattaaaagttgccaatcatcaccaaagtcataatggtagtaaattaccatttctttttttaaataatccgcaatccgttcaagattatcaactatctcaacgtcatcatttatctgattttcaatatctgtttcaccaccaggaatccagatccctaattccttgatcctaaattcatatagatgataatcttcaaaaccaaataaagtttggattaactgatgcagatcttcaaaactaattattgcaggtattttaatacgccgccatataggatccgtacacccctccacatctatcctcaattgatatccattcatcttttatctcctcagttctatataaactattataacaaattatattattgaagtaacgcctttatattgagaagataaaagggatttataaataattatcacgctcgactattttcaacaatcaatgttaaatgttttgtgaaataacgattataaatcacaataatttggccaataaatccagcagataatattgttcctatcccaattccaataattttccccgccaaacagtatgtagtaataattgtgacaagcatcattccacaatcaaataataattttgtcttaccaaactctttgtcaatcacctggcttaatgctttgaccataccatcagcaggattaggaattaaatctaacgttacaacaacatatgctcctaaagcagtagctaaaatagcaatcgctaatagaactaatgcaacaggtaatgaagtaactgtaaaatttaataagttattataaaaatctaaaacatatcccataaaataagaaaatggaatttgtaataaaactttaaaatctaatttctgataaatcaataattgcactccaacaaaaataatatataaaatagttgttgccatccctaatgataaattggtcatttcactaattccaaatggaactgaattaattgccgcaacccctaaaccagtttttgtatttaagacaattccaaatcctaaaatcaatatccctaaaaaatataatcctaacctttttgccataaacaccctccttatttttctttattttacaatattacttgatattatcagttctttttcaacaaaagaaaaaatatccttccaaaagaagaatacttcatcaatcaatttttaaattgacaattccagtttttgaatatcgaaaaactaaatatagccattttgcttcaatcaactcttgttttctgttcaatagatcactaataatagtattatacttttctaaaactgccgcagcctctttccagatttttccctcgattaaatcgtagttatcaattacttgagcaacgatcattgagtctatttctcctgcttgtgccatttgatttaaaatttcacaagtcttttctttactaaaagaagttttataactgcgctttccacatagtgcacttacaatatcacttattgctacaatccgctgctcttgagtcaactggttttcccataaactatgcggataacctgaaccattcagtttttcatgatgccgacacgcaatttctaaaatttcttgatctattttttcttctaataattctcttgttttaagaacatgactacgcattattatcatttgctcttgagtcagttgacccggatattctaatatttcaattggaattccaattttaccaagatcgtgcatcattgcaccataatagatcttttttgtctgttcagaacttaagcttaataatcttgctaactctaaagatatcgtgcatgtggtaatagtatgtgtaactgtaaaataactacgaaaatcaattagagaaactaacatatttaaataactatccaactattctaatgaaagcgaaatatttaaactagttactttttgccattttgaaaatggattagttgtaaattgatagacttgatcaacctgccaataaagagtagtaaccaaattttctacaaatctagttcctgactccttatctaagtaatctttaagcatgctataatcatttgaagtttgtaaaaatacatcaattcgatcacacaaattaataatctgagagatatttttaatttcgtcatcaatataaatcattttttgataatcaagatgatgataaagaatagcaggtgccaatttatctagtggtgaaaagttctttatgaacaaataaccataaatagcatgttgccatatattttttgtctcaaaaataaacatttgatcaatttttctgtcttatatgctccaatatcatgtagcattgctaacataaaaacatcttgcaagtacttttgttcatgactattttgagcctcaagcatacgatatgtcatattagctactcgtaaaccatgatcaatcaatcgagaatcaacataattcaaacaattacttataatttcaataaaaccttaaaaccttcattatttactcctgcaatattattcaacttatttttccatcgcatccactgacactttttcctctcgataaaatatcaatacaaaaacaattgccagtaaacctgcgattatcttactaatcatatagattatgacgccattaccatcgactacactagaaatgaatcctagctgtccccctaaaacataagctccacttacactaaaagcggcattcatcatcttccctttacgatccatttgtgaaaacaatggaatcattgcaatgcttgtcccaaggcttaatagtagtcccatcacactagcactattgacacccaacttttgaccaatcatgaaaatcattcgtgaaaaacgtttaataatcaaatcgcttaaaatcattgatccgcacacaacaatgcacatccgtaaaacaattaccattgcatcactaattaaagcagttgtagtaaaaggcaatgtatcaaaaaacagctgtaaaacaaccattccaaacaacaagatactaataattctaatcaaataaccaaataatgttaaaacaaaaatggttttatcataagaaacatatagagcaattaccaagataacacaaagtataattattggtaataagttaattaataaattaggaatttgtaaataccaggcaactgccactagaattattggtaaacttaaaatcccataaactaatccactaataaatggatttaaatctcccttttttaaagatgctaaaaaaattggtaattgaaaactaattgtttgtcctaatgttgcagtcaaaataactcctgaaaaaatcaaaaaagtactattaccaagtcccgaaacaattgaaaacccacccatatcaggtgcaagaatactcccaataacaattgatggatctaatgatgaatcggcacttattttagtaatcacatctacattattttgaatcaatgtaattgcgatacaataaaacccaatcatactcatggcaattccacccatcgaatccatccctttatcaaaagcagctactagtcccaacttattattcaagatcttgtcaatcaagccaatcaagcacaaaataagcattattaatataaaaaaattcattatcgtacctcaatttccatattcttccaatattttaccaaacaaacctcaaacaaaaaagcctattcggcttttatttaaaatattcagtaatattatccttatcatcaaaataattgatcttcattgcatctttagcacgtttaagtgttgcattcgctttttcattagctttaacacaaccatcttctaacactttcataacagcagcaatatcagcttgtaaaacagctcttctttctctaattggatttaatgtttcttctaaaacattaaataaaaatttttttattttaacatcacctaaaccaccacgacgataatgctcttttaattcatcaagatttttataatcaggtaaatatttttcaaaatattcatctttgcaaaaacaatccaaataagtaaacactgtatttccctcaacggttcccggatcttcaacttttaaatgatttggatctgtatacatactcattacctttttccgaacatcttcactagtatccgcaagataaatacaatttccaattgactttgacatttttgctttgccatctgttcccggcaatctttgacaaacttcattttcagccaacataatttttggatctaccaaaacatcaccataaatccgattaaaactgtgaacaatttctttagtctgctcaattaacggcatttgatcttcaccaacaggaacacaagtggcatcaaaagctgtgatatcggcagcttgagaaaccggataatttaaaaaaccaactggaatacttgtttcgaatccacgctgttttatttcctccttgatcgttggattacgttgtaatcttgaaactgtaactaaattcatataataagccgtaaactcaaataatgctggtacttgagattgaataaacattgtggttttttcaggatctaaaccaactgataaataatctaaagcaacctctaaaatatttcgtcggactttttcagggttatcagcattatctgttaaagcctgggaatcagcaatcataataaaaatttcatcaaattctcctgagttttgtaattccactcgtcgtcttagggaaccaacataatgtcctaaatgtaatcttcctgttggacgatcgcctgttaaaataatatttttcatataaatctccttctttgattaaataaaaaaggcttttatcctcaaggataaaaaccattatgccaccttgtaagacaccatcatgtctgtttttcttaacgcgaaaagcacggcgccactactccagttaagtttcattttgcttctaaccaggcccattcatcagtatctttatcttggctctcaccagccaccaagtctcttaaataaagattagctgtttactcttcctagattatcgaatttactatacttaaaatcataaaacggatataaaatgatgtcaatagtttattaataatcttcaattatttttatttttttctacaatctatcttgattccaatgcctcttctgtatactcaacaaaatactcttgataataaataattctaattaaatctaagattgccataatttgataattaaaactaattccatcaaacttacccggtaaactaaagaaatacttaatacaacttaagttttcattctcaagtagttgattttgggtaatcaataatgtcttactcttgcttaagtgccctaaagattttttcgctaagaaatctcttaatgaacgcccagtagatgaaaagaatactacaaaatcattttcatcaaatttaatatttggatcataagcatgatattgaaccacatttttacctaatgtaattaaatcagtttgaaattcaacagcaatactagttggaaacagtcctccaacaataattactcgatcagcatcatatatatcatggcatatagaaacaatattatccataaaaatatcataatcatttacttcaatcaatctgaataaatcacgatagctcatacttaataatcttgctcgaatttggtcattacgtaaaatatcatcagctaccagcttacgatgaaagtcctcatagttatcaaaaccaagataatttaaaaatcctaggatcgttcgtggatcaagatcactttctttacaaacttgtgcaaatgtatattcaatcattcgatgataatttgcaattacaaaagtacaaaattgatagtaaccgtcataaaataaagtgccatttaaatacttaataattcttgataacaatacatcacccataacacaattctcccttcaagcaaatatttacttttctacacttatactataacagtctttgttgtcaggcgatattaaaaaagaaacattgaaaatattttttcaatgtttctttttaatttaaaacaatcctgttataatcgttacattcattcgtcatggtttgtcattttcaaatatgtttctgttttatatttaacatttttatcatagtctaatttaaaataacatgtataaatgcaatctaacaaataaagtaatgataaccttgttgaaaatgaagaaatcttattataatgattttcatatggacttaagtaaagattataatcacaaagactaactaatgactttagcgtcgttgaagaaattaatatgattggagtattgttctttttcaacaatttaacaattttgtcaacaatcattccccgtccttcaaagctaacaacaattgcaatatgttccttgtcacttgaggcagctgctaaaagctgttgatattcttcaaccggaacattaacaaaacgaccgatttctgacatttgaaacttaaagttttcaacaaagtaaagattaccagctgaagtgtacatatcgatgaactgagcattttttagagctgaagcaatcagtcgtaattgatccaagtcaattagattattcgaggcaatcaaagtctgctcgtataattctttcattttcattgtaatctgatactgcgtctcattttgtgaaaatggatagttataatcaattgttttcttttctttcaaataatctcttattgatgttgataccattactttaagctgtgctaaaccattaagctctagttttttacacagacgataaatcgttggtattgaaataaagcaagcagcactaatttcatcagcactcatattaataaagcgttctggattatttttcatataatcaactaaagtctgttcattggtagttaaatctgttaaattatccaatcgactaaatatattcattttctcagcccccttatcctcgtatcattataataacactttgacacataaatttcctaaataaacaaataataaacataagctaacactcagtaaaatatatcctcccgccatcaaaaacttaccatcactaagcagattcatactttctagtgaaaaagttgaaaatgttgtaaagccgccacataccccagttttcaaaaataaaatccagcgtgattcaagattatacttacttgctaacgctacaactaatccaattacaaatgccccaatgatattgatcatcatagtcataaaaggaaaagtagtatctttaattataattaatcccattaaatatcttgatacagcaccaataaagccaccaattccaactgctaaacattccaacataattatctcctctatataatcttattttatgattattcaaaaatttaagcaagtaaaaaagggaagtttacttccctgccaaataagcttttgcttcatagcttcttaatatttgttttaaatcatcttcataattactaatcagcaaagttccttgaataaattctaaatctatttccacttcatctttactataattacaaataactataacctgttgttcgtttaatgttcttcgataagcataaacttggagatgttcttttaaaaactgctgatagtcaccatagatcaatacctcatattcttttcttaatcgcagtagatcacgataaaaataatataccgagttagggtcttttaaagcgttttcaactgtaatatttgtatatttttgacttggagcgagccacggctgaacaatactaaaacctccaaacctactgttatcccacggtattggcatccgagcattatcacgggaacgtttaccaaaataagcaatgatcgtttcttcatcataattctgtttaaaaacttcatacttatttaatgcatcaacatcgcgatactgtgtcattgattgataatatgcatttgtcattccaatctcttcaccttgataaatatatggtgttccttgcatccaaaacatgaataatgctagcattttcgcagatttttcaagataaaaaggggttgaatcatcaccatatttagaaactgcacgtgggcggtcatgattatcccaatataaagcattccatgctttaccattcaaacctgtttgccaccgttcaaaaactacttttaaatctgctaatttaggacgctgataagttaaatttggtcctttatctaacgacatatgttcaaactgaaaaatcatcttcaattcacgacgatcaaaccctgcatataatagagcatcttctacactgacatcagctgtttctcccactgtcatcgtatcatatttagctaaaacacgatcatgcatctcttgaagaaattcatgtactcgtggtccattagaaataatttcatacatatgcggatcattaataatggctttatccattttttcaaaatctttagatatttggttaataacatccatcctaaaaccatcgatacctttgtctagccaccactccatcattttatatacttcatttctaactttttcattttcccaattcaaatcaggttgttcctttgtatataaatgtaaataatacatttctgtatcttcatcatattgccaggccgatccctcaaaaaccgattgctgaagattaggcggttgatcatttttcccctcacgccaaatataataatcacgatactcattatctttagatttacggctttcaacaaaccagcgatgcttaaatgaagtatgatttacaactagatccataataatttttaaacctttttgatgtgcttgtttcaataattcttcaaaatcagccattgttccaaaatcagccataatatcctgataatcactaatatcataaccattatcataatttggtgattgatatactggacataaccaaataacatcaacccctaaatttttaatataatctaaacgactgataattccctgcaagtctccaatcccatcgttattactatcttgaaaactccgcggataaatctgataaacagcagcctcctgccaccaacttttttgcattatccttcacctcttttatatttaaacataacaaaaagtcaaaatcttggcccttttatactataataggcaaaattttaaccttttcgatattttgaaggaatatcgtgataatattctttaaatattttattaaatgctttcacatttttaaacccatgatttaatgcaatttcattaattgtgagactagtattcatcaaatcattataagcatgatttaaacgaattttattaatataagataataatgtaatccccgtcttttccttaaacattcttgataaataaacctcactaaaatgaaaatgattagctaaaatcgtcaaactcaattcatcatcataatgctgttcaatataagtgacgatttgtttaattatcggtagtttcttttttgtgattgccaacttataaacactacattcttccagcagcagctcatatatttgcatcattcgattatgtataactaaagtttcttgatcaagatgatcacctaaataaataattagctgttctaattgctcttgatcctttattaaagataaatcaaattcacattgtaccagtttaaattcatcaaataactcagttgataaaagtaatgttattattttcgtttgatcctctaaaaatcttaatctatgaatactattactattaatcaatactaactgcttagtattaacaaacttcttttccccattcactgatagttcaaaagaaccttgattacaataaattaactctatttcgtcatgccaatgcggcttcattactttactgcgattaaactgatgattccaaatcttaataggatatttaaagctagtttcaacaacttcatataaatgctgcattatcatgcctcacaaaaaggattgcttagcaatcctcatcttctttcccatcccaacaatatgtacataatttacatttatctaaaccgattgattcgatcatgtcatctaaacgatgataacgcaatgatgtaaatttagagcggcgacgaatttcctcacacatatttttatatctttcactatctgggtcagcgtattcttttaaaatctcatcactaacattatcaccttctagtttttggataacacgacgagtcactaaatctaattctgaactagagcgtgaaaaatttaaatatttacacccgaacatgattgggggacaggcaggacgaacatgaacttctttagccccactttcatataaaaattctgttgtttcacctaattgtgttccccgaacaattgaatcatcaatcaataataaacttttatttttaattaattctttaaccggaattaatttcatcttagcaatcatatttctttgactttgactagatggcataaatgaccgtggccaagtcggtgtatatttgataaatggacgagcaaagggaatacctgaaacatttgaataacctactgcatgggcaattcctgaatccggtaccccagcaacgctatctggctgtacatcatcacgttttgctaataaattaccacaacgattacgcatacactcaacattgattccttcataagttgatgttggatatccataataaacccataagaatgaacaaattttcattttatctccaggaccttgtttaacttcaattttacttggtgtcatgaaaacaatttcccctggtccaagatcacgataatgatgatatcctaaatttaaaaatgcactactttcaaatgtcgcacaatatccttctggtttttccccaataatcactggtgttcttcctaatttatcacgtgaagcataaattccttcagatgttaatatcataatactcattgagcctttaacaacgtcttgaacatatttaattccttctacgatactatccttttgactaatcaatgccgctactaattctgtaggattgacttcacccgaactcatttccaagaaatgagttgcccctttagcaaaacaatcatcttttaactcttccaagttattaattctacctactgttgtaatggcaaaagatcctacgtgggatctaaccaacaacggttgtgcttcattatcagaaatacaaccaattcctaagtttccttcaaattcttctatatctttttcaaatttagttcgaaacggcgagttttgaatgttatgaatcgatctttgaaaaccattatttccatgaactgccattcctcctcgtcttgttcctaaatgggaatgataatcaatcccaaaaaacaaatctaaaacgcaactttcttttgatgcaacaccaaaaaatccactcatttatatctatcctccaaactttatacacccattgtatcttatttgtaacaaatttcctatatttaatcttattttcgctaaaatattgcccaggaaataaagaaaaacctgttataataacaggtaaaatatcaaaacatttgcttatcaatactattatctacaaattctaataaagaaataattacttcttttaactcatttgacttctttaaagtttcttggtcaaaatgtctttccaaataatcatgactaccataatagacttttaaactaccaatagaattagcttctagatcatttaacccttcaaaatcagctatttctagattaccaaaaagctgataaacaagatttcttgctacttcatcattagtttctttgattttatcatcttcttttaaatactctgtcctcattttataatgagatgcttctttcaacaacgttacattcacgactattctatctgaggtttctaagcacaaagaaattagcttatgttctggcaactaaattcctccttcactaatactaaattatatgaaaattatatcttattataccccattagttagataataatcataaaaaaactaggtataagagtatacctagtatcaaatatatttctatactatcaattcaatatttttttaatcttattttattagctgctgactgcctttataaatttcttgggttatcaagattatattctttagcaatttttttgaaattatataaaaggtagcgatgacgtactaaatcatccggcttactacgatacaatgttacaattccataaggatcctccattacaatttgatgattctccaatgtatcaaataaacttaatgcatttctttgatttaacacttcaaagcgacatatattattatctttagtaattatatctagatcaagataaaatctaaattctggcatcggccatgaaattattgatcttgaacacattgagatttttgtactcttaatttcaccgtaaggaatttcaatctcctcataattagtattattgaacctgacagcatccttatcgaaatttaaaacacgattacgtaatgcagacgcttcatcatattccaatccatcaaaaattgcataaacaatcaatcgtgcagtagtagattttttgggctcaaacgtctcaacttttacttgactggtagtattttcattcttcctatcttctgttttttcaccaacagaattttttatttccttctcttgaaattcttttttagattcctttttaagattattttgaggattaaacaattttaataaactatcctgtgttgttatcttaacaatctcattaaaaaaatcaacttgactgccattttgacaatcaatccgattaataatttgtccatcacgtaaataaagaaatttctttgcataactggcaatcatattatcatgagttactaagataattgaggttccttgttgattcagttctcttaagatttctagtacttcatgtgaatttttagaatccagattccctgttggttcatcacaaacaacaatttttggcttcgttactattgctctagcaatagcaacacgctgccgttctccaccagaacattcatttggctttttatatagagtatggctaatatttaagcgttcaccaatctcattaacgcgttccttaatttcttgtggagaaacttcatttaaaatcaaaggtgtagcaatattgtcaaaaacagataatgatggaactaaattgtgattttgaaaaatgaatcccaaatatcgattacgatagtcacttagttcagcatcattcatctcaccgacaaaacgattaaatattttaactgctccactacttacttcatctaatgttgataaacaatttaataatgttgattttccggaaccacttggccccataacactaataaaatccccttcctctaagatgaaatcgacatttcgcaatgcataaaaattagcgccacgttttaataaaatatcctgatcatatattttactaatattattcgccgtgattaagatatctgacatcatcgtacacctccttgattaatttacgataactgacgatcatatatattgacataaatgtatataaaataatataaattgcaatcattgtgataaaagtattgtaagtaatcatattaactaaataactttgatataataaggatccatacataacaattgggaatatcacaattaaaataataaacagcatcatctcttggtaatgaatcttaaaaatactttttttgttgtaacctaaagcccgcattgttgcaattactgaagctcgggttggcaaatagatcataaagcgaataataaaacaaaggaacattgacgccattaatgcaaaaaaactcatcatcattgcattttgcacgtcaatcgaaactgactgcaagaataagaaactaataattattggtacaacaacagctgaaatattgatcattgctgtcattacgtcagtaagatcttttagattactaagtgatatgatccagttctttgattttagtaagactttattatgcaataagtcaaataataaaggaaatgtattatcaatgatgaggacctcacctaataatgaaaaagcaaaataagtaggtaaattattattttcaattgatcttaacattggcgtaaaacctatatatattagtaatattcctagtattgttgataatatttttccttttggaagcatatcaatagtttttggcttttccccctttaaagctaaaccacttgacattaatttaaatggattaaaattagttgtttttcgtggcacatgattcatatagccagcaatatcagttttgatcctcataaattttcccatatcaataacgaccacatagatcatttttgttaagaataaagcgccataaataattaaaatattcgttaggtcaactgtaatcacagcatcataaatagcactatacatataaacccaaccccagccaattaaaaatccaagcgcataggaaattagaaatagcaatccaaattgaattaaaatatagtgaattatctgcttcatatttcgaccacaaagcagtaataatgaaaactcctcgtttttattattaataatgtaattattcacaaacaaggtcaatgcaaatgcaatcatgattacaattcccgtgactaactgcagaatatagccatttgcaaaatccacttcaatattactagttgaatacatcacaaccgaaatgaattcgaatgatgataacagtgataaaactgctaatatccctaaatacagttttttctgcccggaaataatttttttaataaatgtaatcatttccaaatcctcccttcactaaattctttatctactttaagtatacgcttacattttttaaattacaaatattattataattatttttaagtgaataactattatttatattaatcatatgtaaaaaaagtaattaaattcatcttttaataaaacagcccctacaaatgatacatatcattcatatgggctaactatttttatcaatcaatttttcatattcatttataggcattggtttatagtacacatatccctgaaccaaatcacatcctacttcacgcaaaaattctacctgcgaaacttgttctacaccttcagcaaccgttttaattcctaaattattgaccatcttaataatatctttaataattaatttaactttatccggattatctgaatcttcaaaaaaagcactatccaactttaaaacatctattggtagatctttcaataaatttaatgaagaatacgcttttccaaaatcatccatagaacaaataaaaccataatttcttaaatcattaataattttaattagtaaatctgttctttcaaaagcaacactttcagtgaattctatctcaatcattcgatcgggaataccaaattcttgttttatttggtaatactcattcacaaatttagaattgtaaaactgcactttagatacattaaccgaaacaggataacatggtaactcttcatcaattcgttttctaatccagctacaaacttcacgatatacatatttatctatctccttaatatgcatatttttttcaaaaatagggatgaacagatcgggataaatcaatctatattcactcttccagcgaactaatgcttctgcacatgcgattttaccagttttaatattgactttaggttgcaaatatacaagaaattcttgattgtctaaagctgtttgcatcctattttcaatcattttctccatatgcaatttatttctaattgcttcagtataaaaagcatagtgttcttcagaagttctttttatagtatcttgagcaaaaatagcacgatcaatgtactcatcgatagtaagttttcaataacatcttcataacagcaaataccacaacaaagcctgatttgataaccattctttgctttctttacataatcaatcaaaatttgatcaatttctatttgtttttgttttaacatttctttactctcataatgacgcaatataataaaactatcagcattatttcgagcaaaagtttcatttttatcaatactatttgctaatacagctgcatacttttttaatattttatcaccaaattgatatccaaagacatcattaatatacttaaaatgctctatatcaatatacaaaaaagcaaattgaccttttgttttcttaataatatttcttgcctctaaaacaaatttaagtcgattatttaccccggtcaagttatcacggtaagctacgatactcaaagtattatttttgcgttgcaatgttatcatgcttcgtaaataaaaaataattattatagaccatgtcactaatgaaattcctgataaaatcatcaacatcattaatagataattactttgtgtcgtagtataatagtcaactgcaaagacagtatcgtttgctatctcaaataaatcttcactatcactaagcagtttctcatgaccatttccttcgcgtactagaactatatccatttggattgcttcccaaatattttttaatttatttaaatctgtccggtaatcttcatcatcaagattaattagactatatttaccaactcccatatctaactctgtaagaatctcatcaatataatcttttaattcgtcatttggctgatcagttaattctaatttgaccaaacgctggctcgcaccacgaacaatcccaacataattaatcaatgtcccataatcacgaattttatataaagtgtgaactgatattgagcataatagtattaatgttaataaaaaagcgggtaaccccaatctctttagtctcatctctatcacaccctatcaccttaatgatatgctaatcattaggataaaacaagcaaatgccctcatttttacattttttgtaaaacgcttacatttttatcaagtgatttacacaagaaaagatttaaatatcaaatttttacttttataatacaattaacatatatgtttaaaacaactagttgcaaaatatgattgaatggagaatatcatgaaaacaagaaacttaatcgcaacatcatcattagcacttacaatgatgctaggaatagttgccacccctttatcagcacaacaaacatacacacccggtgtgacggtagagaaaaatactaatccagaatgggaagcagactatacagcaaccttcatttacaaagataaagatgcgcgtgatgcaacaaatgttagcgtaagcggtggtttccaattttataaacccgaagaagtacagtcatttgcaaatactggtgacggggctaatatcccatgttataatgcttatcaatatcaagatggaatgttcgctggagggtacaatcttaatggtgatgccgcaaattattcaatgactgaaattgaagatgaaatctttgaggtaacgatccctttacctgcaaatgaatacttttatgctttcaatattgaatattcagatggcagtagtgaaactaatgtcaaagatcctgctaatcccgcacttgctaatgatggttcagatgctggatggagcctattttatgtaggtaatggtgagactaaaggacaagaatatatcaaccctcgtaccgatggtaaaacaggtacttactcatttgtcaattatttagctgaagatggaactactcaacctttaggaatctatctaccgaatggttatgatgctaataaaacatataaaacaatctatgtttctcacggtggcgggggtaacgaggtagaatggatgactattggtgcagttccaaatatcatggataatttaattgctgatagtttaactaaagaagcaattgttgttacaatggataatacatacttcaattgggactatgatcgtattattaataacctatttaataatattttgccttatatcgaaacacattacaatgtatcaaaagaagtaaacgatcgggcattttgtggattatcaatgggatctatgacaactacgactttataccagacccatcctgatcaatttggatattttggctgcttttcaggagctaatgttccagttgatgtaagtaaagttgcacatcttgatcaaccaaacttatatattactgctggctgcatcgatatggccttaatgaatgatagttataatactgcgagcgatcgtactacaactggattcgtagataagctaaatacattaaatctaaccaattacaaattagaaattttaaatggtgctcatgactggtacgtttggcgtgaatcgttcactaactttgtaaaagaacacttgtggactaaagatgttaagatagaaacgcctagtgaaactcctgttattaaaccagaaacacctgcttcatcaacaaatactactactgcacctaaaacaggtgacgatttaaatcttgctgttgctggattatttatcatcatctcagtgacaactggtgtagttataaaaaaacattactaaatacaataaaaatcgtaagttcatgatatctcttaacaaaaaagatatcaaacttacgatttttttattactcgtactttataaattaattcagaaataatttgacttaaataaaataacgaataatagccatcattaattgatttaggaatgccatattgataaatataatcaaatattttctgctcagctaaatcatcttgagcaaaaacaacaagttttaaattcttctgactcgctttctctactactcgtttttgaatttcactataaaaatcattggacacatttaacaaaaccaaagtatctccatctttaaaaaaatcactatgaatatcttgaaattcctgtaaatcaaataaatatgcaggaacttcattcgccaccaaatctaactgcacagtataaaagtcaatcatttcatgagtatcaccaataaatgtaacactacggctattaagcaataatttggttatagcaacaagtttttccatgtccaaattaagttttgtctgacgaagattgctgatagcttcaacatataaagaatcagctaaattatccaatgatgtacgcataaactgctgcatattagataccgttcttaccatatttaaattacgaataaaatagtctaaaccatctttaaaatcctggaaagaactgtatcctatcttttgaacaaagcgactaaccgaagcaatagaaatatttgcttcttgagcaatctgctctaatgaaacggttttaatatcaccaatatgttcaatgataattctagcaatattgtattcattagtattagaaagattttcattacaatatctaaaaaaattaaatcccaactgctcgtgtctcttcataaattccctccattttttatattatatcaattaaatatcttaattaaaaggaattctctttaaatgtctagacacataaaaataaccgggaccggttatttttataaagacatacttttacggtcaaaaattattccacctaccccataacaaacaatcattactacaagtaatcctcctaacattaaataaccttcattattaccgttaatcaatttttgaggatcaaataaagttaataatgttgcaaatttaagtccttccatacttccttgtatattcgaaagcatttgaatcataataaaaactatcgggattcccgctccaaatagcgatgctaagcggtactcattaaaaatacaagaacacatataacaaattcctgttaatgttaactgtaaaatgaaaactcctaaatttaaaaccaaataagctccaatatccaaatcaccaggaaacatcaaagcactacatccaagccctaaacctgtacaaaaagcaattaaaacaaataagtttgttatgataaccagcatttgtgtaaaccacacagatctacgttcaacgccactacataataaataactcatcacaccattatcaacttttcgaacaactaaacgtaatgctagtaaaattccaaaaatcaaaggaaaaacaatcatgattaaaccatataaataagtagagagaaaatcaatcagtgttgtcggggtaccactcattcctaccattgccattatttcaggcatacttttagcaaatgtttctagcgctgttcctagcttaggatcatacattgctaacatgatcgttgtatacattgtcaaaatcaaacaaaaaataactagtatcttataattagatttccattctaatttaaatagcgctttattgaacatgttgatttcctccataaaattgcataaaaatttcttctaaactttggtgtgcaatatcaaaattcattaattcgtagttatttaaacaactgatcaattcattaatttcatgctttattacaacctcaacaacattatcatcagcatttctaattgtaaaagattctttttgaaatttgtaagcatcttgatgatttttaaatgttattatatatatcttttgtttcgatttctttaatgtgtcaatatcctcaatactcaccattcgtccttgacgaataattcctacccgatcacatgttttctctacttcttcaaacatatgtgaggacatcaaaatagtcttaccacgcttcttttcttcaataattaaattaataaactcactttgcattaaaggatcaagtccactagttggttcatctaaaataaaaacagctggatcatgcataaaagctactaccaaacctatcttttgtttcatcccttttgacatctttttgatttttacatgaggatcaagatcaaagcgttcaattatttcttcagcacgccccaaatccttcattccccgatactcagccataaatttaataaactgaattccagtaacctcctccattaaattaatttctcctggaatataaccaatcttcttttgaatctctgcaattttcttactacaatccatcccttcaattaaacaggttccttcttcaggaataataaaccctaacaaatgtctaattgttgtagtttttccagcaccattaggtcctaaaaagccaaaaacttcacctttttcgattttaaaagagacatcaaatattcctttatcattaccataatcttttgttaaaccattaatctcaacaacactcatataaattcctcccgatagaaattctcttttataatatccaaatatctaaaatactcatcttgaatctctttcatattaacattttctaaatcctgatatctatccatatatccttgcgacatccaataaattatgttccaaacttcttcaggatcaactcctgctttaaacttactaatatcagcacgtttaattaaattatatgatgctattacctctgcatataattgttcataactatttcctactatttccttacgattttggtaatagcgcagtgaaaagccataaatatatggatatttagacatcatttccattttgcctaacactgctaatttaattgcatcaaaaaaatctttaccatctataatattcattttttcaaataacttcatcactagtctagcgctatattgtgctaagtactgatacaactctagtttattgtgaaaataataaaacaatagtccctttgatattcccgctttggctgcaatatcatcggttaatgcatgtttataatcatttttactaaatacttctaaccctgcattaataatggccagtcttttttcttcgtttaattcaaagaatttttggttcattttatcacccctttgactgacttgattaattaaattatagcaaattgactcgtttcaacaacccctcgtatcaatctttatgcaatcttaatagtccaaaaaataaagaccaaaatgaaatattttgatcttttcatcatcctatcttactaaactcttagctaaccaaatatctggttttcctaaaccattggcatcaggaatcaccccaactatttgatatcctatcttttgataaaactcatagggatgtcgttcaagattcctaatattttttatctttgaatatagatcatcaaataaattagtattagccaatgttgttttatcaaattcatcatcactgcctaaataaatggtacagcagccacaattcttaagctcattttctaatgctgtacaaagctttgtaccaataccttgaccttgccactttttagaaaccgccaaaggatgcaattcccaagcagtgattccatactggggaatagccccaaccaaccccatcaatatatcattttcaactgcccccagcattattctatttgttgataaacattttgttatttctagctcggcacaatctttatatgcatatggaaatgcttcaatcaataatgtagctgcctgctgacgataataggttaaattagatgttaacttaattatttccatattttcaccccttttacttatataataccatctattttactttaagctgcttaattcttatttttatattattaataatataaaaataggctgtaactaaatagaataaatttattctagaggggttatacctcttttttatttcaactgtttttggatattcataaatgtaatgtaaatatctttatttttaactattataaataattatttctcttttcgatactttctatgttggttttcaagaaatgtgatactagaataaaaactgtaccagttaaatgaaaaaaagcaatcagcccttcatgcctacaaagctcatatcactttcctttcttaatagaactgctagctatcatatagatttacctcaaaatattctaacaaagagtccagtttttagctatttaaaatacttatttattaaatcgtttatatacatgtcaccccaatatcatatttcctgcaaaacaggcattaaagactcccccgctttgaaagatagtattctacttttggagaaatttaaggatattcttttcttataatgaaataatcagcctcgagttcttttaattgtgtacttaacattttgtgtgatatagtccccaatggacgttttaattcactatatcgcattaattcagttttccaaagctaaaataaaatattcatcttctatttgccacctataattgacattgtatattcaagatggttttgaattaactgctccatttgtttacatctatacttattttttcttccattttaaactctccttttagatagtatcttacctaaaagtgcatactgttatttttgttaaggtagtgctatattacacttaataaaaagaaaaaaggagtaatgatgatgagaaatttagataaatcaatttcaatcaacggattgacgttaaaaaacagattagtaatgcccccaatggcaacatcaagtgctaatgatggtgaagtaagtcaaagaattcttgattattatgataagaaaacaaaaggtggatatattggattagtcattactgaacacagttacattgatattcaaggaatggccaatcctaaacaaatgtcagtagcaaaggatagcgatataaaaggattaaagcaattggtaaatataattcataacaatggaagcaaggcgtttgctcaaataaatcatgccggttcaatggcaagaggaacaggattacctactgttagtgcaagtaatacaataccaataacaatgaaagaatccaatatcgaaataccagaagaattgagtaaagaacagattcaatatatagtaaaaagatttgctgatgcagccagacgcgtaaagttagcaggttttgatggggtagaaattcattctgcacatgcatatcttttaaatcaattctattcgccaataaccaatcatagaacagatgaatatactggtacaacacttgaaggtcgattgagaattcataaggaagttattgaagcagttcgaagtgaagttggagaagacttcccaattgctttacgcttaggtgggtgtgattatatggctggcggctcaacaattgaagattccattaaagcctctcaaatgcttgaaagttatggtgtagatatccttgatataactggtggaataaatcgctatatgattccatggaataaagagccaggatatttttcagatatgacagagcatattatggaaaaagtttctattccagttattttgacaggtggaataactaatgccatggatgctgaaaaactactgcaattaaacaaagcagatttaattggtgttggtagagctattctaaaagatgatagttgggcaaaaaatgcaatggaacaaaaataatgcaaatactggtatctataatacaagtatttgttgaattacgatacaataaatccggagatgaatactatctccggaaatgcggcaatgacctctaaaaaatttaaaaagaaagtaagaaaagtttccaagaagttaggaaaaattgcctaaaacttatatttaaaaccatttttaagatggtaattcttctttaccatatcatatttattattaatttaaaatgtattttaaaattataaaatttattacaattaaaaacagataaatttgtatgtacctaagaaaaacattattcattaatatattagaaaaattataaaggagaaaatacataccttttatatggggctttgaatataacggggaattgattacttgtttgaaatcacatgccataagatttataagataataaaaataatgtatttttaagtatatattttgatatttaatcttatttaaaatatagattacagtgtatatgaatagcgatacagctgataaacaattatttcttggattttgggattaatataataactatctttttcttttgtgagtaaggtagttattttttctataattatctcaaagagtaatgttaccactatcgctataattacgattttttgatattatttccactatataatttctaaataatcaaaaaagacaagaaataaataccatgctataataagtactgaaaaagtttaaattgtaatgtaagtttactattttaattttggaaaattattcagtatatttgggacataataatataatgggatatatttttatcaattgctatagtattttttaaaaggaggtaaaaatgaaattaatattaagtgataaatatctaaatcttgacgtatcagatcattctaatacaaaatttatagatctatcatcattaaatatagctaactgcactggatgctttggctgttggactaagacaccggggaaatgtgttatacgtgacgatgcaacaaaagtatatccgtacattgccaagagtgataatttaatttatatcagtaaaatattatatggtggttatgatacccctatgaagacaatgcttgaacgtgcaattccgattcaaaaggcatttattagaatactaaacggagaaacacatcatgttcaaagaagtgtagaattgaaaaatgctacaattattgcctatggagaaataggcactgaagaaaaagagatatttaaagctctggttgaaagaaatgctaaaaacatgaattttaaacactataaaatattatttacaaatgaacaaaacctagaaaaaactgtaaaaacggagatgataaaatggagcgaatagtgatattaaacggaagtccgcgagcacctaaatcaaattctaaatgttatgcagacattttttcaaaaaaatataataaagacattgaatattacaatataacaaagcaaaatcatgataaattatgttctaaaatgaatgatttctccgatatgttactggtttttccattatatgctgacgggattcctgctacacttttaaattttcttaaaagtcttgaaaacaacttaccagataaaaaaccagtaatttcagtaataataaattgtggatttttagaatatacacaaaatgatttagcagttaaaatgatagagctgttttgtaagaaaacaaattgtgagtttggatctgttttaaaaattggtagtggagaagcaatcctaaaaacccctttcaaaatatttgtaacaagaaaagtaaagaaattagcaaattcaatcctatcaaaaaactataaaacactccatataacaatgccgctcaccccaaaattatttattaaagcatcaacaaaatattggattaaatatggaaacagaaatggtatcacaaaagaacaaatggatacaatgagtatagaggatgacaataccttagtttaacagctatatcaaaaaggagctcttatgattttaaatgtagttagttttgatgaagctgcgctccatgttcttttatactagcaattattcatatattgtgtttttggatagaagtttagagtgtttatcgagagcccaactagattatattttacatcaagtccaaacagcccaactaatttcaatatcttctgttttagaattttagtcccattttctattagctaatctttatttgaaaatctcggagcatcatccttagcatctatttgaactttttgtacaaaataatcattattttcatctattaaatcaacaataaaattatatattccatcattatactcagtaatattctttttaatagctttatgcattaaagaaaagaactcaatatagcttatatttgcaataagtattaatcctatacaatcctctatattgtttttttgtattatgtatgcctacaaaactcatattgctacaatccttttttaataaataatcagctgcatacattatattaccgccaattgtattctatcaaaatatgtatttatttactgcttttagaatattaaaacaaaaaatctctttagttttgtttatctaaagagaaattttatattataaaaatgttagcaaattttaaagatgcttttacagcagatataacaatcataatattttttctttatctgtaagctagattaatataatatatggaatgataactactattttatactattcagttctatcttagtattccatatcgatgatagtcaaattagtctgaatctgatgatttcaaacaatgtcaaactgcaacatttttaaaattgtcatatgcattaaattatatatcatttattatcatacctaaagacattcttcgtcaaaatgataaatccttaattgattttacacaactttttgatatcatgcattaaataatccttctctattagaggcttgaatatatttaaaatattatcatctaatttattcaaaatctgaatatagataattggatgatagtcagcaaacataatagttgatggattattttttatgagtgacaaaattgcattgagatttccatctgaaatatcaatactatgttttgtgcaaatcaatcttaaatcttcaaaagacatttcttgtatcttgtgattaattgtttttatggtatcattcataaacatcatacctccttgcaatagcagtgcaacgaaaatgtctttatactttaattatactaatattcaataagttgtaaatttatataataagattttgtttgatattcaaaacaaaattatcaaaatagaattaagaaatatatataaagaaaataattttaccaataccatcaaattaagatgacaacattttaattcaaaggaattatctaaaattaattgcattgaattgttatttttttataaaaaaacatatgataaaaagtggctgtaatgattgtgtagttttttagctattttagagtattacagttctttttttgtaaattaaaataaatgataaaattttagcctttttactctgtcttttcctcattaatttactgttttttgacgcattttaaaagaattaccttatttttgaaaaaatttatatctctaattttacacctgctggtgttcttttaggaagctttccatagattgcttcatatttttcatcgatggtatatatgtttttaaatcattaccgttacgctgatatatataattcttataattccatcacttatcccaaattggatattatattcagatttaaatacatttgtatgcttatagtaatcgtattttatatgcataaatgttacatcaagatctattttgaaacagctgttacggtttcccggcatatctatatgaatagtatattcccatcaaacattttgtgataaaaacagattggttggattaaactattgcgtcacaggcaacgtgcataacagtgtatcgtttttccaacgtatgcgttactaaatgaagaatataaagataggacaaaaaatatatgtttaaatccagaatatatcacactgacaatttgtaagacgatattagaaaacaaacaaaagatgtatgcaccatataaaagatcaatcacaaaaaaagctacattaaaaaatatgaatatgtatgtcccaacataaagattttagaatacagcgctacaaataagttaggatataggaaatacaaattaaatccatagaattgcaaaaaacatcacaatttgagatatacaagagtaaaaagggcttaaggagaatcagcatcaaggactaatgatttttgcgtatcacattctaaaaataatagcaagataggggaacaacactgtatgtaatccaaaaacgctatttttctataagttagtcaatataaaaaaagcgatactcgttttggagtatcactttgtcaaaagtctgaaaaagcgttcatcatagagtgctttttgcacaagacaaaaccacaacataattatttacccgttacagcctctttcttaatatttctatattctttaatgtatggatcccgataaaaagaataagctaactgtaaacacatacaacaccaaattaccggttcacaaataataaccccaaaatatcctaacaatggaataaacagccaaacaaatactattttcccaataaattcaattatgcttgaaactaaaggaataatcttacgccccaatccctgtaaagaatttctaagattcaataagattcctaacatacaataaaatggagcatttagcattaaatataatgaaccattatcaattactactgcactacttgaccctgacaataattgaactagagttggggcaataaagaataatacaactgttgcaataacactccaccctactgcaattaaattagcataacgaaccccttgtcgaattcgcaatccttgatttgcccctttattttgtgaaacaaaagtagatagggctagacccaatgttgctgcaggcatcatacaaaaactatttaatttacgagcagtaacatgtccagcaataattaaataaccaaatttgttgatggcggtttgcaaaataacagttcctgtagaaacaatcgacatcattaatcccatcgaaaaaccttgccctgccaattcttgatatagttccctgctaattttaaaatgctctttgtgaggaagcaaaataggacattttttataaatataataaaaacaaagaattgccgaaactccttgagcaataacagttgcaatagcagcaccttgaattcccatattaaattgagtaataaataataaatctaatcctacattcaagactgaagaaataagtaaaaaaacaagcggcattacactattgccaattgctcgcaataatccagcacacaaattataagcaaacattaccccaacaaaaatagtaatcataaaaatataatcatatgcctcattaattatatttgctggtgtatttaataattctaatagcggatataaacaaaactgtgaaaaaagcattaaaataatagttaacaagattcctattacgattgatcccgcaactgatttttttaacaagttctcatctttagcaccaaaacttcgtgctgtaacaatacttaatccatttcctacccctaaagcaaaaccaactaataattcataaatagcaccacatgctccaattgccgccaatgatgtatcccctaaaaagtttcctacgatcatcgtatccatggtattgtaaagttgttgaaaaacattagccacaaataatggaaacgcaaagatcaacaatgattttaaaattggatctttggttaaatcaactttcattttaaacataattttccctcttttatatattataactcatattattgtattcctattatcgccacttttcaacaatatcccttttcaaagaatgaaaaaaccaagttaacacttggtttataatgtcgcaataaaatcttttaatatttcgtaacaatttacaaatgatgcaacttccatacgttcatctggagtgtggatgtctgccatattaggacccatcgtaataatatctagcgctggcatctttcctttaaagattcccgtttctagtccaccatgagtagctacttcttttacttctgctccagtacgtttaaaataaaatactttaaataaatcacgtaattttgaatgttggtcgtaattccaaccaggataataatttgctggagtaattgtgccaccaaaggcatctgcaataatatctaattcatcaaccatgttcatcacagcgcttttcattggtgaacgtagtaaataatctatttttaattgtttatctttaattgatactacacccatatttaatgaaaccgttgtcaaatcttcaatcactaatgaacgttcgacaaaaccactcttagctgccatcattaattttataatatcttttgattcttttatactcaacgtttgctgtgcaatatcattatttaatgataactcaactttaacaccaggatcactaatttcaaattcttcactaaaataatcttgatactcatctgccacttcctgaagtaacttaaaatcacttgtactagcaaaaacaattgcacattcacggggaatcgcattattttttaatccaccatttagatccactagctggatatctaaatttgccttgatcataccatacataactcgagcagccaatttattggcatttcctttaccgcgatgaatctcacctccagaatgtcctcctgacaatccttttattaataatgtataagttggattttcattactagtaaaatataattccttagtaatcattacatcacagcctcctgatgaagttgtgcaaatttctccttcattttcactatctagcccaatcattcttgtcgcctttaataaacttgcatcaaaacctaacgctccatcaagaccaacttcttcggcaactgtaaaaacacactctaaaggtggatttttaacattaggatcacttaagattgccaacatataagcaactccatagccatcatctgctcctaatgtcgtcccattagcactaacatagccatcttcaagatacaaatctaatggatcatgttcaaaatcatgattactatctttattcttttcattgaccatatccatatgtgcttccaacatcagtgtttcatgattttcatatccttgactagcttctttgtaaataacaatattatttaagtgatcccgatgatatctaaaacctttttctttcgcgaatgcttcaacaaagtcagcaatcttttcttcattataagagccatggggaattttacaaatttcctcaaaataataattaactaaaatctctgtgtctaaaacagccattatacctaacctccattttcactatttttattataacaaaatgtttaactaattaacaaatcaaattaaatgatgtataataatattattaaaggactttaataattattttaatttagattaacctgtcattaaatatcacaatcatgtatagcttttaggaggactagccaatgaaaagacaggcattaatactaagcagtatttatttgattataatgtgtctaggttatatttggtgctatccttttttcaaaatagaaacaattctttttgatttgatctttagaacagttttatggtcaatatctagctatggattatatattgtcttgctaatactaaaaaaattcagtttgttaaaaaacattgctattagcaaaccatttttaataacctgcctcccttacatttatttaattatatttcttgtagaaggattcattggtttagtaatggtttttgtttttaaaacatatgtttttgcttactcttttttctcaatattaactatcctccatgcaaccaaattatctcaagattttctcaacaattattgtacttattaataatgcaggagtggcggaatggcagacgcgctagtttcaggttctagtgagattttctcgtgtgggttcaagtcccatttcctgtaccataattaatttaaagtttgtcgattgttatctacaaacttttttgcatttatttaatagcctaaagccccctgctaaactcacactaaagtgaaaaaacttttactctaggttactatctgatagaatataagaaaagcgaggtaagtaaatatgattagaacacgaagatcagccttcttaaaatagaaaaactaactatatataaatcaaggaattttaggaacatataaaacaatgaatccaagttatactatttttcatttcgacgatgaaactttttctatcctatggagtgaatataattataaatttaaatatttctatccaaattacttaaataatcttaaaacttacggtgaaattaaaaaatatttcctaaacaagaatctgttaattcatttaacttttcctgtccaccctaggtaacattcaatgagtttttttaacaattaatgataagccacattacttattaccaattttcgcaattggtaaatactacaaacaaaatgataaaactcttctatcactatcaattagagtacatcatcaattatgtggtgcttaccatgtttctcattttattaatgaattacaaattatgattaatgaacataaatttataaaggaataatgatatgattgaaattaataaaaaactagtacaaaacttaattaacgaacaatttcctcaatggaaagatttagtaattgaaccagtcgctaaaagcggacatgataatcgaacatttcatttaggatcaaaaatgactgtccgtttgcctagtggtaaaggctatgcagcccaagttgaaaaagaacttacatggctaccttatctccaaaaaaatttaaccatgacaatttcttcgccaatagctaaaggttatccaagctgtggatatccattttcttggtcaatcaacaaatatatagaaggtgatactttaacaaagcaaaacattaataatttaaatgaatttgctgatgacctagctaaattcttaaaagaatttcagaaaattgatacaaccaatggtcctcaagcaggacttcacaactattatcgtggtggtgatctagcagtatatcacaatgaaacaatcgaagctttagaaaatcttaaaaccgttttaccaactgagctgctactgaaaatctggcaacgtgcccttaatgcatcagtatctgatttaaatgtttgggttcatggcgatatagcccctggcaatttacttgttaaaaatggtaaattagcagcagtaattgattttggtgttttaggtgttggagatccttcttgtgattatgcaatggcttggactttttttgaagaagaaagccgacagcgattcttaaaaaaactagatcaagggatgattgatcgtgcttgtggctgggctttatggaaggccctgatcacatataatagcgatgaagcagaatgtgcggaaaatgctcaatatacaatcaatgaaattattaaagatgaaaaaaaacttggttaaatccaagtttttttatcctttttgttcaattttatctaatgctttaataacatcccaacaaaaattatttggttgtgctaattctacgaaatgatgtcgcttgaattgtttcattacatttttttggactccagcaaataaaacattaatattattttggcgacataattctactacatcaataaactcccggatccctgaatcatcgattgaaggtacaccacgcattgaaaaaataatattattacattcatttaaaatctcattaacttttgtaattatttgttcttgatttccaaaaaacaatggaccagccatataaattactttagtcctttgatgatcataatttaactccttatcaagtcgttgtggttcaatatcacttgtttcaatatctaaatcagaattattgattacaaataaaatcatagatataaacactccaattacaattgcaactgtcaagtcaaatacaacggtcgctaacattgttactaagaattgtgtcatacttgtttttattcgtttcgaaaaaaattgtttaatttcatgccattcattcattttccaggcggtcataattaacacaccggctaaagctgataaaggaattcttgacataaatggacctaaaacaaacattgaaattagtaaagccgctgcatgaaaaatactaactaaacgcgtttgaccgccagctttaatcgcaacactcgttctagcaatagcagctgtagcaggaacacctccaaaaaaaggaataaccatattaccaatcccttgtgcaaaaagttcttgatcagcatttaacttttcatttttcatttttccagcactagcaccgcataaaagtgattcaatcattcctaacatagcaatactaaatgcaggaataattagatttgttattgctgttaaatttaaactattcaatgacaaacgagctttaggcaataatgtagatggaatactcccgacctctgctacattaaatttaaatactaaattaataatcaaagcaataataattccagctaatgaagccggaaatatatttccccattttttaggccataaaataataattgctattactagtatcccaaaaaacagtgcctctaaatttacattaaagcctaacatacgataagataagattttttcaatcggattgcttcctttcgaagtaactccaaaaaaattatcaatttgtccagttgcaataattattgcgattccactcgtaaatccagtaattacactagctggtataaatgatactatcttaccaaacttaaataatgaagcaattaataacattaccccagaaataaaactagcaacaaacaccccctgtaaaccatatgtagttgacaatccaattaaaattgctgacattgctccagttggtccagaaatttgatacgatgccccagataagccaccgatcaataatcctgctataatcgctgtaatcaaaccagccccagcatcagcaccactactcaccccaaaagccaaagctaacggcaacgcaaccgcagctacggttaatcctgccaaaatatccattactagcttttgaccattataacctgcaaattcttttttcaaacttaatacataatctttaaacatcctaccctttatcctttcaaaatacttttttattataatgataaatattagtgatttaaagtaaaaaataaatattttactgttttttattaatatttctaacttattataaaaatatcgataaaatcatcaaccataaaaagactactacttctactctaaatacattaaaagaggctataacacctaaaagtttaaaaaactttattccttatagcctcttttattcagcctctccaataatatcaattaatttagccaatggttcacttatatatttttcttgatgatataaaagctttgttttattataaagcaattcatctgtttccaccgtttttaaagtaccatgctttaactcctcagtaactaaaagagtaggtaaaaccgcaaaaccaaatccagccttacatgcttcaatcaggacctttgaatttacacttgtccatttaggatatgctgccaatcctcgcaaatataaacaactatcaataatatctctagttgcactccctttttcacgaagcaaaagatcatgagtacaaagttcttttaatgtaatttcattatccgcaaaataatctggtgcacataaaacgtttaattgataagaagaaaaatctattacaataaagggtcctggtggaactactccctctaccaaagcaagatcggcttctccacattccaaaactgctaacgcttcttttgcactgaccacttgcacctcaaccttaatattaggatagctgcttgcaaattgttttagaatctttggtaaccaaaaggttgcaatagtaatacttgaaacaacttttagaggcgcactcatttccaaaacatctatttgtttttctaagtcatgatatagtgataaaattggaataactttttccaataataatttccctgcaggagtcaatataattgcctttgataaacgatcgaataggacagcatttgtttgttgttctaattccctaatcgcatgcgatactccagattgcgtaataaataattgttttgctgctttagtaaaactccctgtatcaactactgttttaaatattaataaatgtctaaggtccatagctttctcctatcatgaataaaagtaatgtatttcattaaattatatcattttactaatgtatatacaacttatataatcttgatatataaaggagaatattaatgaaagcaaataaactaaaagaccttacatggttgttctttatcaatatttttattagcagctttacatttggaggtggttatgtggttgtatcaatggttcgtaagtattttgttgaaaaaagaaaaattttcaatgaaagtgacttaatcaccatgtcggcaattagccaaacaacacctggagcaatcgcaatcaatcttgcggcattagctggttataaagttgccggtaccattggaactatcgttagttgcattggagcgattattccgccaattactattttggcagttgtttcattatggtatcaagtttttagtacaaatcacatcattatggctatcttaaaaggaatgcaagccggaattgctgctattatcgtggatatcctaataggaatgacaagagctattaatgaacaacattcaaaattattaaccgcgatgattcctattactttcattgccagctatatctttaaagttaatatcgttgtaataatcttaattacaattatcgtagccactgctcaactatactatcgccggaggtactgccaatgttaaatttatttataattttctttaaaattggattattcagtattggtggcggctatgcaatcattcctttgattcaagaacaggtcgtcaataactatcattggatcagtgccaatacatttactgacattatcacaatttcgcaaatgacacctggccctttagcagttaatacctctacttttgtgggtattcaactagctggaattagtggtgctatcgttgctacaattggttgtatttttgctggagcaacaatttcaattatcctttatcttctttttactaaatatcaaaaactagaaataattacaaatattctaaatactttaaaagctacatcagttggtttgatcatgtctgccggtgcaacaattttaattctaacttttgttgaaaataactctatcaactttttagcaataattatttttgtaatttctttattatggttacaaaaaaagaaacctaatccgattgccctaatgattatcacaggaattattggatatttcgtatattaagacaaaacccggttactaaatctaataatgacctttgatttcttatttattcagctagttctaaaatgcctaactaaagattatctttatttccaatgaacattttaacaaaatcaaaaaaaactgcctatatgacattaagaagtgtctaatatgaatggttttggtcttgtctaatttaatatcaacaatccattttttacattacatcaacaaattagtcaatcaatttaatatagataattatctagcttctaaattactttattaataacgctgatattcatatcctaaactctaattaattattctgaatagataaaaataattgtattttttattacaaatatttatcacttctttgataattatcaaaatatttagttttagtatagctttcctaacattattgaaagataacaatcttacttctaatataaatcaatacttgacttcattgaatattgaagataataaatgtatacataattcaaaatacatgaatatctcattattaaataattttccttactaaaccactattcttataattgtgtgacctagttacagaactaattttaaattaaaattataataatcttgaaaatgaatcatagattaataattatggaggaaaaaaatgaatactaatcaaaaaattcttatcgtaggcggagtcgctggtggcgcttcagctgctgctcgtctaagacgtttagatgaatctgccaacattattatgtttgaaaaagatgaatatatatcatttgctaactgtggtttaccctattatattggtggtgaaatcactgatcaagaggctttaaccttacaaactcctgacagttttaaagcacgctttaatgtcgatgttcgcaactttaacgaagttactgctattactcctgaaactaaaaccgttactgtatataatcatcaattacaaaaagaatatcaggaaagttatgataaattacttctttcaatgggagcaaaaccaatcaagccaaatattcctggaatcaattcaaataaagtttttacacttagaaatatccctgatacttatgcaataaaagaatacgttgatacccataaaccaaaacatgcaattgttgtaggtgggggatttattggtattgaaatggcagaaaatttacattcaactggaataaatgtaacgattgtagaaatggctaatcaagtcatttctccgattgactatgagatggcttgtgaagttcatcaacatcttataagcaaaggaattaacttagttttagaaacagaacttcaagctattaatgaagccggtaacaagctgacagttactctaaataatcaaactgtagatacagatatggtaattatggcaattggtgtggtacctgaaactaagattgtaaaaaatacagaaattgcaactaattctcgcggagcaatcatcgtcaacgataagatggaaacatcaatcaaagatatatatgctgtaggcgatgctattgaaatcaaaaattttgttactaataaagcaagttatgtacccctagcaggcccagctaataaacaaggacgaattgcagctgataatatttgcggttttgatcgccattatcaaggaacacaaggttcatcaattttaaaagtctttgacttaactgttgcaagtagcggaatcaatgaaaaaactgctagggaattaaatctcaattacgataaagtctacacatattcagctaatcatgccggctattatccaggtgcggtcaatatgtcaataaaagtcctttttgataaatcaacgggaaccattttaggggctcagatagttggttatgatggggttgacaagcgcatggatgttttagcagctgctattcgtgccaaaatgacgggttttgatttaactgaattagaactttgctatgctccaccatatggatcagcaaaggatcctgttaacatggctggttttgtaattgaaaatattcttactgacaagatcaaacaatataattgggatgatgttgcatcactgccccgtgatggcagtgtgattctattagatactcgtactgaattagaatatgcaaatggtcacatcgatggttacattaatattccattggattccttgcgaactcgtcttcatgagcttaatttaaataaacctatttatgtaacctgccagattggacttagaggctatatagcatcacggattttaagtcaaaatggttttgatacttataatctcaatggaggatatcgcttatataatacaatttttaatcaagaacatgatgaacccaaaatcaagacaatgcatcctgcttgtcccatagaaaatccagaaacaattaaaattaatgcctgcggtcttcagtgtccaggtccgattgtaaaattatcagcatcactagaaactgctaaagatggcgatattattgaaattcaaactacggacccggcttttgctacagatctagatggctattgtcgtcgtactggtaatgaactaatagaacttagctgtaataaaggaattagcagtgctaaaataaagaaaggacagaacagtatctcaaacggaaataaaaataataaaaatatgattgttttctctggagatttagataaagcaattgcatcatttattattgctaatggcgcagcggctatgggacgaaaagtcacaatgttctttaccttctggggactaaatatcattcgacgaccagaaaaggttaaaatcaaaaaaaattttatttcaaaaatgtttgcaatgatgatgcctcgtggttcaaaaaaactatcgctttcaaaaatgaatatgggtggtatgggagctaaaatgatccgtactattatgaaagataaaaatattgacagtttagaagatttaatcaaactagctcaagataatggtgttgaactaattgcctgttcgatgagtatggatgtaatgggcattaaacaagaagaattgattgatggtgttacattatcgggagttgctactatgttagctaacggtgaagaatctgatatgtcactatttatataataaaaggagcttggaattaatttccaagtctcctttttatgattgtttcttttttcttaaaattccaattcctaagatgctgatcaataatgttcccgccaatatttgaatagatactgaatcaccagttttagctgctgaagtactatcatcttttggtatctctttttctggcgtaggaataactgttacatcaccttcaactttatcgtttgtatttacatcttcttttatcactaattgatctaacgcttgatgcaattggtcatacatctcatcgacttctgcctgtgcagcattttcatcatcaataattgattctaccttctctaacaaggcttcaactttagtaagactttcagaagtatatttttctttatcaagtttcaatgcagtattaaaaattgatattaaattatttttatcagctttttcaactaatgctgcgactacttcatttaatttattaattgcttcatcaacttcatgtttcgtagcattatcatcattgaaaacttctttagctttttgtaaagtgactgtaagtaattcaattgattgaggggtatatttagctgtatctaattgtttacttgctgaattgattgtttcttccaactccattttatcaacaatcttagtaagtcctttaacactatcttccaactgatcaattgcttttaagatatcttcagatgtaacatcatcatcgttataaactttaacagcattatttaatgcttcttgatatcgcgcaatactattaggggtgtatgatgaaatatctaaatctttatatttcttataaatttcctgtaacttagattttaaagttgttccataaacttcaaattcccatagtgaatacccataatcacttccaacttcaatccctaacatccttacatatcgtcctgttacatctttatatgataattcatcaagacctccatcgccatcattaatatctgatatatctgtccaaacttgaccatcattagaaacttgcactttgtatttctttgcaccgcttccttcccaattcaaaataactttagaaatattataaatatcttgtaagtctacatatatccactcatcattagatttccgattagatacccagcgtgattgctttccatcaactatttcatttgtacctttaccatcaaacgctagcgaagattcatatgttttatttccatctttcgaatcaacatattctgagctcgcattcgaagatttattcaaagctaaatttacatttggattttcaggttctaatacagcttccccgtaaacttcaaattcccataatgaatatccataaattcctccaggctcgattcctaacattcttacgtatctgcctgttgtatttttatatgtcagttcatcaataccacctttaccatctgtaatatgtgatatatctgtccaattctgaccatcattagaaatttgcactttatattctttagcaccatttccttcccagttaagaacaactttagaaatatcgtaatcagcttctaagtcaacatagatccattgtgatgttgctgttggatcatcttttgttcttaaagatacccagcgtgattgctttccatcaactgtttcatttgtacctttgccatcaaacgctaataaagattgatatgttttattaccatcattagggtcagtaaactcgctacttgccttagaggttttattcaatgcaatatttacttcaggcaccactggttcttggtgtaattttccatacacttcaaattcccataatgaatatccgtatttagaagcacattctatacctagcattttaacataccgagcagtaacagtttcattaaatgggatatttgcaattccaggttgtccattctcttctagataaaccttttgccatgtttttccatcttcagagacaagaatttgatattttttagcaccatttccttcccaataaagttttacacccgttaaatcataattcgcttctaaatctatttgaatatattcatcattcgaatttctatttgaaacccatcttgattgatcatttccaccattattttcaaaacttccatcaatagctctatttgcagtataaacattgttataaactgaagaagctgttgctgttttatttaaagcaatattctctaaattttctgcttcaacaagttcgccataaactgaccactggatgatttggtatgatgagccactagaaccatttaattttaatctaacatatcgtgcttcttgattacctaaatctgaaatgttctcattaccaccttgtccatcaattatagtttttactgtttgccacatttgtgcatcatcagaaatctgaatttcataattaggtgcataattatttccccaatcaacctgcatacttgaaattttataaattccttttaattctacatagatccattgatcaccggctgcactcgaaatccaagacgtattggctttattatcaattgcatgagtcggtaagttcaaatcctttattgtacttgaaaatgcatttttattagctgcaatatcctcatctttataagaaccatacacagaaatttcataaatactaataccatattttaaagttcttgatttatgtgacgaaactctaacataacgcccatatacaggttcatcaaaattgtattcatccaataagctacttccagttgccatactatctttaaccgttatccagttatttttgtcactagagacctgaatatcataatcatcagaacaagcggattcccattgaatgctcatagcattaatttccgaatattgtcccaaatcaaccatgatccagttctcatcttcatttcgtaatgaactccatcttgtacttgtattaccatctacaactaattctttagtatttccagggtcatttgttgacgtactgcttgcttcaacagatttattaagcgctattgaatcacttgctttaaatgtaatttccttaatttcaaaacaatttccatttccatctttcatgataatcttaatatatgggtagactccttttaattcaatcgtgtctgtcttaccatcaccattacttacagatttcaataattcataatttttaccatcttgagaaaccataacatcataagcactagcataattatcaccccaaagaatattcatagatgctaaatgtttattgttgccagtaaacatactgatccattcattttgcgtttcttcactttgccaatatgtattttcatcaccatcaaaagctttttcgacttcgtgtccaatcattgaagaattagtatgataacgattatctgagccttctgataacgtcattgtttgtccagcatatggtaatgctcctgaaacaaatgttgtttgtgtttcttgattatcataatttaaatttacatttacagtttgattggctgctgtatcattgactgctacagagatttttcttgtatcctctgattcatcaataataatactgcaaggttgatcaacagtaattatatagccatctttatattccaatgaaccagcttgatagaaattaatttgagtttgttttaaaccgtcatgtcttaccgcttgaactttttcgttattagcaattacagtaactggtgtattaccggcatattgactaactgcacctgctgtggtatttggtacgacaatataggcatagctatcattgcttggctttaatccatgatctaaataggctgtaaaagtagccggagtttcattcttttttgcttcatcccataatgacggattattagtttgaacactattacttacaactacatccgtattttctaagaaaacatatccaacttttccattatatagccaattagtgttataaatttgttctttcgttccctcagccacactttgaccaccaacatttacatcttcagcttcgcattgatttaatgttgtatggatattgactccctcagtagaattgatccccgaacctagagcaacaaattcatcatcaaagaagaaatatcctttctttacttgagtcccctttttattcatatcataagcagtatttccatatttaccattggataccccaattgtatgttcagttccatttgtaaaacgacctgcattagcataatcttgaacgattcgtgctgctgttgttgttcctggacaatgagcccaatcatatgttggataaacgttagtatattcatctccgtcaactgtgattgttgaagctgctgatgatgtccaataaattaattgtcctccgtctttatcataacctgaccagctgccacgccattcaccaccgatgatttggttagagtccattttaatattaactccgtacccatctcgcatgtgagaagcataaccagaacgccacatataataattaccattttttccattaactgtattttttccttggatgttatcaaggattgcttgatattcatcagctcgatcaggatctgattcaatcattctcttaagtggatcgatatactctgctgcatagttatcatagccaacatcataatcatatggccgatatccaaggtaaagctccataatatctcctctgattgtccagcttgtcccatcaatcatataatcagccattaaatcaatgacatcttgttcaaatgcataactagtttctcttagcatataaatccaaaaactcatatctctaaacattgacattccatatccattagaatagaactgcctaccatgcatatagaaactgttatcaacctgaactgcttcagcagtattatcatcagtttgaacaactaagcaataacttaaataatcatctacaagttcttttaaatctaatttcttaaatcctgtagaattggtatgtttagtcccattttctgtaataattgcgtaataaacataattttgatcaaaccataaattattttgacctgtaccatatttaactggtgttttttccaataatttattaagcataatatccattgcatctttacttacaatgctttccataaataaagcaattctagaaaatcttaattgaactccaatttgattctcccaccagttagaagaagatggattcatttttccccaataaacaattgctttatttagcttattaattacttcttcgtcatgataaagagcgtttccctctttatgataagcaactgtaattgcttgtagacgatcaagagctaaataaggtgaccatgctgttccattagcagcacttgatgtcgctttgtagtcaacatccccaaaagcgccatcttcttgaatcaaatcaagataatcttttgcttttgaaacatagcatgtttctacttttgacccatcatcaatcgtgtctaaagttaaaaagtaatcttttaaacgcgttttgattgttgcaaaatcactctcacttgcataagttacattcatggaacttaaaacaagcccaaaagacataactaatgacaggattattctcaatgcctttttaatcatataatatcctccttttaaataatattgaaaacgcttactacatctattatttttagttattatcacttgaatttcaacgaaaaatcacttgaaaaagtttttttataaacctttataatcagtagaatatggttgaattataaatgatgaaaacgtctttaaatttttaaagacgttcgttcaactattttcacacttaataattgtgtcatcggaatattatctttacgatgaatccgatcaattagattagataccgccacctcgcccatcagttccttttgaacttgaactgttgtgatctgcggtactgatttaacacacaacggtgtatcgtcaaatccaacgacactaatatcctttgggacttttaagcccatatcttttaacgcagtaatcacagcaaatgcattagaatcatttgcacatactaagacctctggtaattttttagtattcaaaatttcaattattttatcaatttgattagttaaaacatattcttcaattccttgtagaaaagaatatttttgaatatattcatcaacctttgaataactaacaatattattctttaacagtgactgtttaaatccaataaaacgatcctcaaaactaaaggaataatcaagatctccaaaaaaaccaatccgttgataccctttattaataacatgcgtagtcatcatataactaccttgtttattatgcgtcaaaacacaatcacacggtgtacataatgatgtaaaatctactagaacaacgggtacaccaatatttttaagcagcagcaggttactatcagatattttgcctacaactaatattccagccactttcctttcttcaatacattcaggtactacgaagtgcccgtcttcaaaataatttaaaattgaaaaataaccaaatacttttgcttgttcaacgattgaccgtaaaacaatcgaataaaagtgtcctgtatctgcataataactttgcattaaaatacaaatatttgatttagaataaactgatagatattgtcttttttgattaatgtaacccattttatcagccatttttaaaatttctaaacgcatttcatcgctgacaccaggtttatcatttagtgcaattgaaacggcattaattgaaattcctaatttattagcaatatctttcatcgtcactttcatctttgtttcacctcattaaatagtatagcacatgctcctcgattatagtacttctccatttgatgcaattacttgttgataccaggcaaatgatttttttctaattctacgcatatcttttaaatcatcattttcacgattgacgtaaataaaaccatatcttttcttcatttgtgcccggctgcttaaaatgtcaaccggtccccatgacaagtaaccacggcaatcaacaccttcttgaatcgctaatttcatttcctcaagatgtttcctcatataatcaatacgataatcatcgataatttggccatctgcatttatttgatcattataaccaaaaccattttccactatatatattggcatttcataacgatcatacaattgtcttaaagtaattctaagaccagttggatcaatcgtccagccaaattctgacatttccaaataaggattctttttaattacaacatcattaatatttgttagactctcctcaccataatgtgaaattgtcgacatataataactaatagatagtgaatccgtaatccctttctttaatatttctaaatcaccatctaagatttcaggcattgttccttcatttttcatatttgcaaaataatatgaattataatgtcctcttgcaaaaacatctaaaaaaacataagcttcactttgagccttcatactttcaagtgtatcaagaggatgacaagtttctggataactttgaaccactgtcgccattcccataaccttaccacctttttgatgaatatattcattaataagactatgagcaatcaaagtattatgcataatttgattatcaaacgtttgagtatcaactccatccggacaaactgccccaaaaaacatttttggccctttctgtaaaattccattttgttcattaaaaataatccaattttcaactttatcatgataacgatcaacaatctttttgcacagttctacaaatatatcgactactttgcgactataaaatccattatacttctcatataaaaatgctggcatttcaaaatgatataaagttggaattggttgaattcctcttttaagcagtgcatcaataaaatgttcataaaacacaaatcctttttcattatatactccttcatcgctcattaaacgtgaccaatcaagtgaaaaacgataagcattaaatcccatttcctgaaataaatcaaaatcctcttcataacgatggtaactatcgattccgtctttaaaatcagaatattcaccggtaactgttaaatcacaaaccgctggtactttaccatccagtgtatatccaccttcactttgatgagctgtaactgccccaccccataaaaaatcttttcgtaacattacttcttcctcccattctatttctagcagtatagctattttttatataacaaattactattactgatatagatttattatctttaatgtcagcttgaatttcaactcataatcacttgaaaaaaaattaattaacttgaataaaaaagaataatcataatgattattccataattaatcaatagttagtttatctaatttatgtttatcaactattgttatttttcctcgtgatatttttacaataccctcttgactaaaatattttaacatcctagttacaacttcacgagccgtcgccatatatttagcgatttgttcatgagtaatttttaactctaaagaattattcttttcagcttcttccttaagaaaaatagctaagcgtttatcaacagacataaataaaatttgctgcatcgcccacataacatcagaaaaacgattggttgccattttatacccaaatgtttcaacataaatattttgcttcgccaattgttgaaataaagttgccgtgattgtaatgatttcactattttcttcaatatcaataaaaacatcaaatgtaatcgtttctaaaacacatgatgccgaaagaatacatacatcacctgcaaataaacgatatagtgtaatatcacgtccatctggtgataacatatatgtccgcaattgaccctttctcactaaaaccacacctaaacaatcatcactaccacgatgcattgttatgcctttagcataagtttgaagagtggcattttattttaataactctttttcgttttcatttaaatgatcccaaaaagttaagaattttgttaattcttgctccatcattttcaccctttcaaattaattcaaattttttaatgcttaaaaaatgccatcatcattaatcgtgtcagtaacaaaatcactagctgccttaactaaatcattagcattccccatagcaacaccaactccaacatgttttaacatatcaatatcattattcccatcgccaaatgccattacttcacctaaattaatttgatagtgctttatcatttgatcaattcccttattttctccgccatcaatagggatgatatccgcaaagagcgatgtccagcgtgctgatttacaattaggcatatatgataatcgttcactatctttagtctcgtctatatatgccattagttgaattatcttactttcaattatttcattaacagctttaatgggatagccctctttattcagtgatctagcagcttcatcaagacaataattttggatattactataattaccatttatttctacaaataatacgggaatctgatttttgttaatatatggtaataaatttctaatatcttctctttcaatatatttttcatgaataaccacttcatgattaaaacaatactgtccattacttgtgagaaaaccatcaaactcgaaacaatcttgaatcactttaagattattaggtggccgcccagtagcaacgaataatctaattccattcttccgtaatttttttaatgcttcaaaagtactagatggcattaagtgtgtatcatgatccaatagtgttccatcaatatcaaaaaattgcttttatcatctacttatcctcatattattttatcttttagttcttaacataataaaataatcgtctttttattataatgttttccaatacagtatagcatatgtaatccttcaattcataaaaagagaaagtaatagttactttctcttaactactatttgactaaatcaacaatcaactcagtacatttatcgattccaatttcaccactatttaaacataaatgataattttgcgctaacccccaaacttgatcagtataatatttataatttgctcgtctttttttgtctttatcagctaaacgtttctcaggcttctcatctgtttccccatataatctgacgatccgttccacttttttatcaagatcactacaaataaagacattaaaacaatcatctcgatctcttaaaatataatctgcacatctcccaacgattacacatggtccttcttgcactaattctaaaataatctttctttgcatcatccaaatataatcattcattgacatcccatcaatataatgacctaaaaaagcataagcaaaaggattactagatggtgcatattcaccatgttcttcaatataattcacatttaatccactctctcgagctactttttcaattaattccttatcataaaaaggtatgtttaatcgttttgctacctctttaccaattgttctaccgccactaccaaattcacggctaattgtaataatgttcttgcgcatgatctgcacctcctcctaatcttagtcattatctatactttaattttactactttacaagcgaaaagtaatgagaaatcactaattttattgtccaaaagatattttttataccattcatacaataaactataccattcatacaataattaaaatatactaaaagtaagcccctataataaaggtgtaaaagataactgcaagtaataaaggagatttctaaatgaaaaaaattggattaatggttgttgataatagtgtgatcaaacaattaaaggaactaatcattaaaaatattgacagtgaatatcgtatcattgagattcatgataaggaaatgttatttacaaaaaaaatggatttctgtattattgaagattcttttgataatcaaggaatcaattatgctagaacattaattgaaaataataatgatatgcttgtactaattatctcaaaagacggttcaactattttcgatgcagtaggtattaatatttccagctatctgcgctatcaagatattaaagcgaaatttgttccagcaattcaagatatcatcgattatcttgataaacgaaaattactactatttaaaagtgatcagggcatcgtcaatacccaaacaaatgatattgtttattttgaatatttaaatcgcatgacatatctaaacacattagacaaaacatatcgcatttttattcaaaactttgaatatctacaaaaaatgcttccaaaaaccttttttaaaatctcacgttcagcaattatcaatatctttagattaattactttaaacagtgaaaatgtaattatgaaaaactacgaaaataaagatattgctatttcaagaagaagatatcaagatttacttgtagtgttaaaaaaacatgctatttcttttacagaaaggaaactaaaaaaatgaaaacactatctacaaaagcatctaaacaaaaaatcttatctttattattattagctggtttatggagtatcatgctgatcattgtcttactcgcagctaaaagtacttgggccaaaaatttaaatagtccttattgggctccagccatcattacaattggaataattttctttatcacttacttcatcttcactgtaagagcgttattttaccgccagcacggatatgataatcaatatatatattattataaatcaacaagttattttaatatccttaaattaattattaatacgctttttaataaagaaatgtatcaagataaaattgcctttaaggatattaaaaaatgtgaaattggatggtataatcaaacatttagaatacactcatttggaagtgaagtcgctcatccaatttattttaagattaatgaacagatggttattaaaacagatttaacttcaaataatgagcatattattgagttagctaatcttcttaaaagtcatgtaaaagactttaaagatccctaccatttagttttagcaatgaacgatcgcagtattactgtatacgaatatattgaacgcatcattcataacaaaataatcaaaccaaatctatataaatagacgtgcgaatatttcacacgtctattctttattattcaaaatttaaataatatatcataaaactatcctgctcacagttttcccaagactacttatacaaaattgataaattttataattaaatagcaccttttcaaacaccctattactatattcaaattttgatttgaacttttcataacaattctttccaatcaattttcaaacttatctaaacatatattattactatttcttataaatttccagtattctacaaaaacttttgtttcacacgtaattactctattttctcctcaatataagcccacaaacaatcctcattatcattttctatcgtatagttcaacaaccatatccaataatttaatcttttttatacgttccttcttagtttcccatttttctaacaatgtgggggcaaataatcttttaatgtttcatgatcttgatttgaccatgacatttaaatcgcataataacggttttctactttttttattcgttcctcattccaaaaattatcactgctatctaaaactaacaattgttttttataagtcgatatatttttagagctttcatttgatgttgaagtgccacactaataaatgtaacaatgaaaatatcagcaaaaatcagtacactaatcatgcataataattcttaatcatcatcccctcttaaatgttaaattattcaaatggataaatcattccccattgagtccgaatttgacttagcagtgaacttacatcccgagttaactgtaattcatattcaccaagattatttataatataatcttgcatatcaataacttcgtattgtagcccctgtttatcatcaccacattcaatgacttcctgatgaccatctttagtataagttatcgttgcttgattactccgcggataattattaatttctatataccccaattctcctgatatgaccccacgcttcggttgttttgcacgcattgttagagccattacaaccatttgaccatcttgatttttcataatgattcctgattgttcatcaaccccagtttcaaaataatcagcagttgtaattacaacattaggttttgatgataaaaagtaccgggcaaaacttgttgcataaacaccaatatctaataatgccccaccagctaattcttttgaaaagaaacgattattaacatcatattctttacagctgccaaaattgacttgaatcatttttacatttccaattactcctgcagcaaccatttcctttaattttttgtatagcggcatatggaaaattgtcatagcctcttgtacaacaacattatttttcttagctaaagcaacaatttcttccaattgacgatcatttacagtaattgctttttcacataaaacatgctttttcactgctacagcctgtttcatgatttcataatgactattatggggtgttgcaatataaacaacatcaacatcaggatcatttaataattcctcaacacttccataagcatttttaattttatatttcattgcaaaatcaattgctttattcatatcacgatgtccaaccgcatatatctctccatttacatccaacaaagcctgagccatttcattagcaattacaccactgccaataattccccaatttaattttttcattattatttcctccgtctaatctttatagatatattatacatagattacaaatagaaaaactagcaagaaaataattttctcaccagtttcataaaagcctatctttctgacattttaaaatctcttaaagcttaataaaaaactcaaaaatttaaataaagtattcattttccctaggtgttgccagtttcttgctaaagctttctgcaaatgtttgatattcttgattgttattcatactcttagcatggactggacaaatacgaatacatctaaaacaagcaatacaatcattattaattgtcttacaatcttctatatcaatagcatttgtaggacacatattgacgcaaaccccacagccgctgcactgttcattagtttctgggcgaaattttcccccagttcctccttctttatatgggtatttccctggtactgaaacaaatgaaaaattatcatctttaatttttagccgcaccaaactaccaaacaattcatcacgatataagtcatcacgattaggacgacccacttgaatttgaccataagtatgttcacccactaaagctgcaccagcaataggaataaatccttgctccttaacagtattaaataattctaataatgcatcatcataatgacggtttccatatgtaacagtaattacacatgatgtatgatcaccccgaaatgattttaaccgttccaaagcctcgtgaagaattcttccaccgtaaaccggaaaaccaaaaactacaatatcatgacgactaaatgtcatctctggaatcgtttcttctagtgttaaatcaatttcacttaactctccctcaagtccacgagcaatactaacagctgacttcttggaagtgtaagttggtgaaaaataaattgcatatgtccgatcaatcttcataatatatcctcccacctttatttattcttttattatatcattaaaatatgtactatctattaattaaaaatagattatcacaataaattgtattatgattaaactagaggtgatgaaatgagtacctattttataaatcgtataactatttttataaatcgtataactattgatcatgatttaatcgagcgaaacagttatctaaatacaattgctacaattaaatactttgatttttgataatccgattaccttttttgttggagaaaacggcacaggaaaatccactttattagaagcaatcgctattaaatatggctttaaccctgagggggaactttgaactttaattttcacactaacaatactcattcatctttgcatcatacaataatccttgatcgtggttatcgtcgtcctgatgaaggcttctttttaagggcagaaagtttttataatgtcgcaacacaattagaacgatatgaaaaaaatgtttttaatccctatcgctattatggtggtaaatcattacaccagcaatcacatggtgaaagttttttaacattgattcaaaatcattttaatcagaatagtctatatattcttgacgaacctgaagcctcattatcaccccagcgccagctaactttattaattactatttatgaattagcaaagcagggctcacagtttattattgctagtcattcaccgatcctattaggaatccctggggcaaaaatacttaattttgactcaaaagagataacacctattgattatcaagatactgagagttatcaaataacagaactctttattaataatcgtgccggtctattaaataaattattaaataagatcatctaccctttcaatatgattttatttttataaaaaaactagctgcataagcagctagttaagccatttctgttaaatcatcttttatttcatcaaaagcaacggcaatgtttaaaccatgatcaccaattctttcaaaatcaattaatgtttctgtatataatgcactatgttccggcgtacattttttatctcgcaaacgtcttaactgattaagtgaaaattcatgtgttgtaatatcaatactatcttcaataacatcaactttttcaacaatgttatgaagttcatcgcgatttaagacatttaattcctctaagatatttcttgtcaggtcattcataattttaatttctctcatcgcttcatctgaaaaatgttcatcttcactatataatttctcagcacgttcagcaatattaaccgcatgatctccaactcgttctaaatctccagccgtttttaagaataagccaattgatttagaatcatcgattggaaattcattagaaatagcattggttgtaaactgaataatttctttgtttaaataatcaatatattgttcatcttttaataatttttcatgtgtcttttcatcatacttaataattaaatcaaaagctctttgaacatttttttgaactatatttaacatattttgtgtttcattaaataattgtgtgttagcgattgcactagttccaatgtgataatcattggtaaagatactattatccaagaacttaacagataatttatcttcaaaaccttctttttcaggtaaaaccaaatatgacaatttaactaactgcgccccgaatggcagcaataataatgttgtaacaacattgaataccgtatgtacattagcaatttgtgccggaatatttgttggcgtcaatgactgcataaatgatgcaaacggtgttaacatactaataaaaacaaagacgatcgttccaataatattaaatgaaagatgaatgatcgttgtacgttttgcattacgccctgttccaatactagctaaaacggcagtaatacatgtaccaatattttgaccaaataatacatatattgctgatggtaaagtaattacgccactcatcgctaaagcttgcaaaatcccaaccgaagctgaagaactttgaattatcgctgtgaatccagcaccaactaaaataccgattaatggattttcaaacgtagtgacaagattaacaaattccggtgaacttctaagcggtaccatcgcactagacatcatttccattcccatgaagagaattccgagtcccgcaataataccaccaattgcatcaagttttttacttttgaaaaaagcaattaaagcaacaccgacaaatgcaataactggtgctaaagctgtaatatcaattgcgatcaattgacctgtaattgtagtaccgatattagcacccataattacccaaaccgcattttccaatttcatcaacccagcattaacaaacccaacagtcatgactgtagttgcagatgatgattggattactgcagtaataactgctcctactccaacgcctagaaagcgattcgtcgtaagtttttctaaaattgttttcattttgtttccagctgctaattcgagaccatttgacatcatcgtcatcccgtataaaaatagcgctaaaccaccaaacatagcaaagaaatctgtaagttccatcttattccccctgttacacggttactttaacataaaatttacatactgcaaagattgttaacaaattcttaacttttctttacatatttttacgcattttattaagtttattcaattttcttgacaatcctccaatttaagatactattactatagacagttcatttgtaccatcctgtctataaacaaaactagggctatgctttttatgttgtttttaagcaggctttttagtgagcctgcttttttatttgatggtatagaaggaggaaagatgtattttttaaaaacggaacaaagttttgatagtgcacattttttagctggttatcatggtaaatgtgctaatattcatggtcatcgctggaaagtcattgcaactatcaaaagtgaaaaactgctagaagatccccaaaataaaggaatggtaactgattttggagatttaaaaaaagatttaaaaattatcgcagatagttttgatcatgctttaattattgaaacaggcagtttatcagaaaaactataccaagcactgatcgatgaaaatttcaaaataatcaacttaccatttcgtccaactgctgaaaatttagctaagtatatttacgaggctttaagtaaaaattatttagttgattgtcttgatgtatatgaaaccccaaataactgtgcaagttatcgaggtaaattatgaataattataaggttgttgaaaaatttattagtattaacggtgaaggaagtcgtgcaggtcaattagccgcctttattcgttttcattattgcaatttaaattgtagttattgtgatactaggtatgctaatgattcaaatagcaattatgaacttttaagtgctcaaaatatcctagattatttaaaagcaaataaagtcgttaatgtcactttaactggtggtgaaccattacttcaacaaaatattgattatttaattgatttactgcttaaaaatggttttagtgttgaaattgagactaatggtagtattgatattaaaccctttattaaagaaactcgaccaatctttactttagattataaagtacctagcagtacaatggaaaatgaaatgtgcttaaataactatcaatatttgactaaaaatgatgttgttaaatttgtagttagcaatctcagtgatttaaataaagcaaaagaaataattgatacttatgaccttgtcaatcgtaccaaagtttattttagcccagtctttggtaagattgaaccacggatgatcgtcgattatatggtcaaacatcatctaaatggtattaatatgcaactacaaatgcacaaattcatttgggatattaatcaaagaggtgtctaaaatgattgatactaaaaaaatagaggaacacatctacggtattcttaaagccttaggtgatgatccagaacgcgaaggattaaaagatacgcctaaacgagtggcgaagatgtatggcgaagtttttgctggaatgaactatagtaatctagaaattgcaacgatgtttgataaaacatttgttgacgatttagacttcgataatcaagaggttgttgtaatcaaggatattgatatctttagttattgcgagcatcacctcgctttaatgtatgacatgaaagttacggttgcttatattccttgtggtaaagtaattggtcttagtaaaattgcacggattgctgatatggcagcgagacgtctacaacttcaagaacgaatcggaacagatattgctgaaattattagtctagtaacaaactctaaagatatcgctgtaatcattgaaggtaaacatagctgtatgtcatctcgtggaatcaaaaaagttaatagcactactgtcacaagtactctaaccggtcgttttaaaactgatagtaagctgcaaatttatttacattaaggagtagtaagatgaaagcattagtattatttagtggtggagttgattccaccactgcattagcactggcaatccaagaacacggaaaggacaatgtagttgctctttcaattagttatggtcaaaaacataccaaagagatagaagccgcaaataaaattgcccaattttatcaagttgaacacttgtatttagatttagcaaaaatcttcacttatagtaattgctcattactacaacattcagataatgagattccccacgaatcgtacaatgagcaattaaataaaacagatggcaatcctgtttctacttatgtgccttttagaaatggtttatttttatctagcgctgctagcattgccctttctaaaggctgtaatattatttattatggtgctcatagtgatgatgcagctggaagcgcatatcctgattgtagtaaagtttttaataatgcgatgaaccgagctatttatgaaggcagtggccatcaattggaaatcaaagccccttttgttgaaatgaccaaagcagatattgttaaaatcggtctttcattaggcgtaccttatcaattaacttggtcatgttacgaaggaaatgataccccttgcggcacatgtggtacttgtattgaccgccaaaatgcttttttgaaaaatggaatcaaagatccattattaggagaataaaaatgacaaaaaatttaaccttattaggtaatcaaaacactgtttataaagatgattatgcccctgaagtattagaaacttttgataacaaacatcctgaaaatgattattttgtaaaatttaattgccctgaatttactagtctatgccccattacaggacaacctgattttgctactatctatattagttatgttcctaatcaaaagatggtagagagtaaatcattaaaactgtatttattcagttttaggaatcatggtgattttcacgaggattgtatgaatatcattatgaaagacctgattaaattaatggatcctaaatacattgaagtttggggaaaatttacaccacgtggaggtatttcaattgatccatattgtaattatggaaaaccagaaacaaagtgggaaaccattgctttcaaccgtttagctgatcatgatttatatcctgagaaaattgataatcgttaaatataattattagagacctttttcaaggtctctaatttgttttcaactttacatcaaagagttagctcaaaaaataatatattttaaaaccgttgacatcatattaatcatcatttatacttacattaaatacttttataaaactattttatataagatgtctggaggaagaaaaatgaaaagtgcagtattttacggaaaacatgatattaaggttgaagaagtagaaatgccacaattaggtaatcaagatgtattaatcaaagttatggcctgtggaatttgtggtactgatgtccatatttatgagggtgataaaggagcagcaaatactactcctcctactattttaggacatgaatttgctggaatcgtcgaagctgtgggacatgaagtaaaacatgtaaaagttggtgatcgtgtctgtgtggatcctaatcaactatgcggaacttgttactattgtcgtagtggtattggtcatttttgtgaagatatgattggcatcggaacaacacgggatggtggttttgcccaatattgtgcagtcaacgaatctcaagtatataaactagccgatacaacatcatttgaagaaggggcaatgaccgagccagttgcctgctgcttacatggtcttgacatgtgcaacattactccggctagtacagttcttgttattggtggtggcatgattggtttgttaatggttcaattagcaaaattagctggtgctcatgaaattatcttgtcagagccagttgctgttaaacgtgaaatggggcttaagatgggtgctactttaaccgtcgatccaatcaatgacaatattccagctcttttagctgataaaggaattcatcgtatcaacactgttatcgagtgtgctggtctacctgcaacaattaaacaagcaatcagcttagctggtaataaatctgtagtaatgatgtttgggctaactaaacctgatgatgaagtggctatcaaaccatttgaaattttccaaaaggaaattgaaattaaagcttctttcatcaacccatatactcaacaacgagctttagacttaatcaatagtaaaaaaatcgatgttagttcaatggtttgtgatatttgcagtttagataaattagccgatattctttcaaaaccagaattaagaaataaaggtaaatatattattaacccatggcaataagaatgtacaattttatgtacattctttttttgccatatatgaaaaaaaatggacattcgccattttgtcggttaagatttaactgtaaggagaacgaatatgaaagatattgaaaatgtatgtttagaagttgatgagttagatttcgacaactatagtccaattagtccagatattgttttaacatcatcatttaaatttaaaaattttgaccactatgtgaaagtgaatgctaaagaagaatttgcttatacatacacacgggacgggaatccaacacttaatttactagaaacaaaattagcacgtttagaaaaaggcgaagcagctcaaatgttcgcctcaggaatgggcgctatttcagcatcaattttaaccttagcaaaagctggtgatcacattatcattgttaatacagtctatggctcatcagttaaattaatcaaacaattatcaaaatttggaatcgaaagtactaaaattgatgtcagtgatactttagaaatctttgattatgtcaaaaacaataccagtatcatctattttgaaagtccatcatcacaaaaatttgagatgttagatttagaactaatcagtaaatttagcaaagataaaggtatcttcacgataatcgataatacttggtcaacaccattattacaaaatccattagttcatggaattgatgttgttattcactcatgttccaaatatattggtggacatagtgatatagtcggtggagtcgtaatttccagcaaaaaaattattgatgaaatagttgaatttggacaagttttactaggcgcaacgatgtcaccaatgaatgcatggttagcacttcgtggtctaagaacattaccggttcgtctaaaatcacaacaagaaacacttcaacaagtaattaattttctacaagaggatcctcgaatcgaacgaatttatcatcctctttgtaacggagagcaacaaagcgaacttgctcataaatatcttaaaggatatggtagtttattaggggttgtcttaaaagatgcaaatccagaaatcattaaacgttttatcgattcattagaacattttactttagcctatagttggggtggttttgaaagtttagtaatgtcagtttataaaggaaacaatattaatgagataaaagaacgtggtctatctttaggacaacttcgcatgtatatcggacttgaagatagtgaattattgattagtgatttaaaaaatgccttggatcaagcatatcagtaataaaaataagggttgagcaatattactcaaccctttctttaaataaattgaccttgaggcaaatccagataaattctcgcatttaaaattttttgtccattaacttgagctttatttgaaaaaagacgtattagtacaataactgcaagtttattactagatagagcattattatcacgattagcaattaaaacaacattatttgccacctgccatttgccattacaagcataaaaatcttcaagctctcgtttacacgtaaaaattccaaaatctaaattatcctcaatccatttagtcgctgtttgaactatttttgaacttaatccctgcctacgataatttggcaaggtagcaatacaactcaatccaccaatttgatatttttcattatctatcgttgtttccatccgaagaaccgctccgtaactaacaacctgattatctttcatgatatagaatgactgcactgtaagttcttcgttatgggcatcattacaatcatcactaggccaaacaacatgtaaaagatgtacaatttctctttttatttctttggacatttgataatagtccaaagaataaacagtaatttcttccattatccaagtaattcttgcaatgcattaatgtccgcaactaaataatcactattacaagccatcaattcttcttttgtcccataaccatacaacactccgatacaaggtaaatcattttcatgggctccaatcacatcatgctttcgatccccaaccataatcgcttcatctttatcaatcatatttgctgttaaaacataatcaattacttcagcctttttttctcgtccattaaactcactaccgccaacaaaatcaaaatacttagctaaaccaaaatgttctataatttctttagcaaatatttctggctttgaagtagcaactaacaatacttttccctgatctttcaaagtttgcaaacacacttcaattcccggatatactttattatcaaaaattcccttggttgaaaaatattcgcgatatttaactactgcttcttcggcttttaaagcatcaaaaccataaaattcttgaaaagaatctcttaaaggtggtccaataaaaggtaacaaatcatttaagtcattaacttcgattccataataatttaaagcataacgtactgatttagtaatccccttcatcggatcagttaaggttccatctaaatcaaacaaaatatattttttattcatataagtcctccactacactaacttatattttatccattattccctacattagcaactatatatgcccttttatctgtagtaattaataaatgtttttgatcaatgatcattacttcttttaattgctcatctaattctttttgtggatccaaatcaactaactgattactttcaatatcataaagataaagtttttcattattaaataaaacaagataatctatgctacaataagttcccatataattagtaccataaaaatgataatcaattcttgaaacagcgcctgtaataatatttgttaacttaatcgtttcatcactatattcaatattgacaatcgttccttccaaaggatatttatctaacgttctaacttcatttgttaaaatattaattaaataagaatgtccattttcatcataagtaacaacagtctgttcatcaataaaagtaatacaattactatgcatatatggatcgatatttttaatgagattggtttctccagtttcaatattataattttcccacccctgatcactcttattaattaaaatattagtttgttgtggtgaagtaattggatttactgaaatattatcattagtaataaaacttatttgcttactttctaaattaatcttagcaatatttaaagcacgctgctctccatcattaatatcgacacaaacataaatatcattattaataattttaggcaaaacactatatatacatccattaaaatcaaatgcaactatttgctcttgataatccgcatatttaaaactgaattcatgaccagctatactcccgtaatactcattaataggacattctcttatttgttcattttctaacgtaaaaactttaagaaaattataatcctcatcaatgattccaaaaaattcattttcagcacgccaatgcccataatctaattttagtgtgggagtatttttgttgattgaagaaaattcaagagctgaactaattttcaaattactgctaaatcgctgactcaaccaagtacgaaatgaatcagaaaatgcataagtaattcccaatgaagaaattcctattgtcataacaattaaaacaattgcaaatatatacttaattctaatcaccttcgctctttttgtcggttcaaaattagttgcagtcacttcatcgatccagtttctaggagtttttattaagtcaaattcattaaatttattcataaaaatcatctcccaactttttctttaacaattttcttcccctaattaattgtgattttatcgtattgtgattttcttttaaaatagatgcaatttcattagttgaatatccttcataataatacaagtataaaacattacgatatttacttggcatattcattacaattggtagaataattaaacgctgatcttcttgacctaaaatcaacttatcaatatcaatttcccttttccaaaattgtttttgataatctttacattcattgatagttaccctaatcaaccaagcttttaaatgttcctcactttcaaatttcttgttgtaacagtataatttcataaatacattttgatagcaatccttagcatcatcataatttttaacattcataacagcaattctagtaaccatgtcactatactgatatacaacttcttcatatctttctttttccataacgatcccttccactatgaatacgattaaaaacgttcaacgggtgcattaataattattttttatactttcattataatcgattgttttacttttttatcgatttagtaaaataaaacagcccaaaaggctgttattgaagaaaatcgtctttacgctgaactaattttctaacaaattctgttttaggatgttctaaaatttctcttggtgatgctaattgtacgactttaccttgatccattaccataacccgactacctaatttcaaagcttcattaatatcatgtgttacaaaaataatcgtgatattttcttgatgatgaattcttaaaatctcatcttgtaaagtagaccgtgtgatttcatcaacagcaccaaatggttcatccattaaaagaatatctggggaagcagctagtgctctagcaatccctactcgttgctgctgcccaccacttaattcactaggatatcgatgaattaactcttcatctaaccctactattttcatccattttgatagtgcttcataagttctttttttatcatttttatttaataagttaggcacataagcaatattttgagctactgtcatgtgcggaaataagacacttccttgaattgcataaccaattcctcttcttaatttaattaaatcaactgcctgtgtacattgatcatgtacaagaacttgtccttcatcaggaattattaaaccattgatcatttttagaatagtggtttttccacaccctgaactaccaactacagttaaaaactcaccaggtgtaatttttagattaaaatcatcaataattactttttcaccataaaccttttttacatgtttaaattcaatagctgtatccatatgttcctcctatttcactaaattaatgctaactaaaaattcgtgagccacatcttcagcatcttgtccttttgtttcaaccaaatagttcaattgtgccatttttgtttcattgagaataccagtaagtttatcaaaaacattatttaattctggatattgttcaagaatttcattgcgtacaactaaggcccccatcgaagttgaaaagaattgttgatcatcttcaaggacaacaacatttgctgttgatagttgaccatcggttgtaaagacatccatgacatcaaccttaccttcatttattgcctgatattttaaaccaatgtctaaatccatagtattcttaaaagtaaaattatatttttggcatagtgcatcataaccctcaggaatttcataaaaatcatactcagctccaaaaactaattgattagatattcctgctaaatctgaataagtttttaaattatactgctcagcaatctcttttcttactgctaaaccatatgcatcactaaaccctaacagccctgtccaggtaaattgatatttttcttgatattctttaactagctgttcatacattgtttcattataaaaaccttcatgttttaaaactgtattccaacccgtactcgtatactcaggatataaatcaaactcaccgctaaccattcctggttgaatatttgaagttcctcctcctactccctgagtaatcttaactttaatatccgtatcttgttcaatcatttctttcaacattgctccaataatatattgctccgtcataggcttagtagcaatatttaaagttactgtttgattaagattgcctgaaatcattgatatgatcaagactgcacaagttgtcacaattactactaagccatactttcttttagattttaaagtagcttttcgaatggtaaataacttttcaataaagcctaatactatatctgtaattaatgcaagtattgcaatcaataaactacctgtcaaagtcattgccgtgttattggtagtaattcctcgatatatcgctacccctaaaccaccggcaccaataaaagaagcaatccctgctaatgctattgtcatagttaccatatttctaaaaccagacataattactggaagtgccaacggtaacttgattttgtataaaatttgccaacgtgttgatcccatccccgttgcagcttcaataatattatcatcaatattaataattccagtatatgtatttctcaccattggtaataatgcataaacacttaatgcaatgattgcggtactattaccaattccagaaaaaggaattaaaaaacctaatagtgaaatagagggaatcgtatacataaaattaataattcctaaaattgttttagaactttttttatattcactgattattactcctaaaatcaagcctataacagtcgcaataataattgcaattagcgatatctgcatatgttcaattaataattttaaaaagaaatcccctttttcttgtaataaagatagcatatctcttaacataatctaacctactttctcaattgcccgcaccggacagttttcataacataaaccacaatgtaaacaatgatcttgcattattttatacttgcttccacttttaatacattgttgtgggcattcacgcttacagcgatcacaagcaatacacctattactaatcagatatcctttattaaaaattcgattatcacaaagatcatattgtgaacgttcaattggtacttttgataaatcaaatatttcaatttcaccatcaaaaatacaaaatacttctaaaatattacgactatcacctggataaacctcattcatactcggattatcaataaatattttttctaaccattctttttgattactgacttttttaacttttccttttaaacgaatcgatgcataatcttttgttagcgcaactaatgaaacgaaatttttatcaagtaattcttgataaaagtttttcccccgagcagtcaaaaaatacaaattattattttccacagccattacatcgatgattctaatttgtggatagccgtcactgtctacagttgccattgctacatcttttatttttctaagttcatttaaataatcattaactttcatcactcttacctccgctcgtctttaatatacactagttgatttttatatgaaagaaggcacttttttgtaacctagttactttaacgaaactaaaaaactatagctagtcgtgtacaacttcatagctatagctctaataataatcaaacttatactctataatattgtattaggcacaccataagtatactgttctaatatcaaaataacaaatcatatgcctaaaataaactactttgcaaaaaacctgaagtaatcgtcaaagactgtggtactgtccttaaaagtgcttcaatatgacgattttctaaccagtcatgatttaaatgttcctctaaaatcaatggcattcgatcatgaatctcacacatacttttatttgcttttgttgtaacaatagtcacttctgtttgcccgttaacatttcgataaattcctgtcattaacaataacgatcgtttttcgttttcaaaagtgaacttatgtttatgaccgtcccattcatagaagccactagctggaataaggcaacgatgagtaatcacttcttttttaaagaatggtttttccaataaagtttcacttcgcgcattaataattaatttattatcaaaagtactaaagccccattttgccttttttaattctaatttattatctcgatcaataatgattggtacaatattacttggataataatctttagcaattaataaatcacgttcaaatgtatagtcaattctttcttccaattccatcaaggcttttaattctaaaaaatatctgccacacataataatctcctattttactaattcacattttaaaaactctaagatttgcgcatttaatgaatcatcattttttatctcacttaacatggcaacttcattacaacattcaccacatatatcaatcccaataacatcgccacgtttaattaaatctgctaaaattaatttaaattcaattaaccgcatctgcccctgctgccaatcagtcgtgactacttgttcacttaaaacatctttatcaattgaaaaataaacaggatattgtttcaaaagttcatcaattatcttccaaacttttaaatcaccaagattattatcacacaaataaataacgcgctccctatacttaggatcgattaaatcaacttgttcttgtgcaattccaatcaaaatgatctgttttaaatattgattatcttttaaagcatttaagatccatgatccacagcttaaaatatccccaaacatcggtttaatcatatcactatgatgatcaaagactattaaaataaaatcataatttatcttccttatccaaaattcacttacataatgaaaattacctgaatcaataaaatgtattcctgcaggcagataatcacctattcttttaatgatcttcgcttttgcctcctcactgcaataaccacgtgtccccttaatatctaaacaatcaatccaattaatatttttatgcttataaaaactttctaactcataaataccagtaaaatccatgacagttaatttcttttcatttacaatacttaccccataaaaccaactccatttaatgcttataacaaaaacattctaattcatgatcatcaacaatacctattgcttgtaaatatgaataaatagttattgagcctacaaaactcattcctcttttttttaaatccatcgaaatatcatcagataacttcgttgttgttttaaaattattatccttatttttaataatttgatggttactaaaaccccaaagatagtcagaaaaactaccaaattcagtttgaatatttataaaaattttagcattattaattgctgcaccaatttttcgtttacttcttattattttttcatttgctaataactccattacttttttatcatcatagttagctattttaattacatcgaaattatcaaatgccactctaaaagcttctcgtttttttaaaatagttatccatgataatcctgcttgaaatgtttctaataagaacatctcatataatttttcatcatcataaaccggtacaccccattcatgatcatgataatttttataaatttctgacttttcatctacccatgaacacctttttaccatcatcattctctcctttttaactattttatcatgcttataagaataagcaaatattacacaaaaaaaactatcccagttaaaattactcattcatcatatttaactttttaaatattttttccagcagctaaaataataaattatattacttttaatattgtttagtttttagtacaatatttcaagatgttagaggagatttaaaatgaataacaataataatgatgtaacaaaaaaatatggattatttacagccattacaatgattgttggaatttgtattggctcgggtatattctttaaaagtgataatgttttaattgctacaaacggcagtattgcactaggcgtgctatcatttatcttagccgcaatttcaatcatttttggttgtcttacaatcggtgaattagcatctcgcactgataaagttggagggctaatctcatatgctgaaatgtttttaactcgtaaagttgcatgtgctatgggctggtttcaaacctttgtttactatcctacaattacttctgttgtagcttgggtcattggagtttatataaacatattatttaatttacaagccagtttagaatttgaaattttaattggttatatctttttactactttgttttgtttacaatattcttttaccaaaatttggtgcttttatccaaaatagtacaaccctaataaaactgctccccttatttattttaggaatattgggaattatttttggtgatcctattaatggtttagcaaatactagtatcaatacactaagtggtactgggtggatttctgcccttggtcccattgcctattcatttgatggctggatcgtaacaacttctatatctcatgaactaaaagatgctaagaaaaatatgcctaaagcattaatgctaggcccattaatcgttttaagtatctatgttttatactttattggtatctcatgttatgttacacctgaagtagttatgactttgggggatcgtcatgtcagtttggcagcacaaaatttatttggtccagcctttagtaaaatgattatcatttttataattatttcggttattggaactgttaatggtttagtcattggctatattcgcatgccatattcattatctttacgtaaaaatatgtttcccttttctaaacatttgcgtaaaatcgataaacgttttcaaatgcccttaaattcagctatctgtagcttgattatttgtacgatttggatgttcgtccattatttatgtactaaatacaacctattatataatagtgatgtatctgagggagctatcggaatatcctatatcttctatactttattatatataagggtatttaaaatgtatcttgataaggaaattaagagtaaatttaaaggtttagtttgcccgattttagcaactatcggctcattgattatcctatctggaggtattcaaaataaactatttattttctatattatattttgtattttactttttctatactcattatattactatcaaaaaaataatcactaaataataaaccatctcttagaatcaagagatggtttattatttataaagttgattcattccataaaaattcttctatatcttcataacttgaaatctctcgatcaaaaacataagcaaaaaattgctgcaaattcagtatatcatattgtttaaaatccacaatatacagcatttcatatacttctttcttcaaaatccgtaaatctgaaataaagtaacaccgcataagttttacagcatcttcaaaaatatctttttgcataattaaccatcctttcaagtcatatatctatttcttctctttatcctgactccgcttaatttgtaatttcccattgaccttattaacttcaaaaataaacggattttgctggaaccagactaaatcagcagcctttaaattccactgtttataagcaataataaaagtttgataaaccagctcttcagcttctcttcgagtctctagagccgattcgaaatttgaatatgttcctaaatcaaaacgtttacctttaaaaccaatactagctcgatatttattatttttcagtttataaataccgcatgctccactagtattatttctttttaatttttgtgagttaataaactctatacatgtaccatcaactaaatgaagattattataaacactttcagtaatctcttttttctacacccacaaccgacatactgcccgtgcattagcccagtttcactaacttctgtgttcttttttctgttggagaaattgccataagtcgccaaacttctgtccttttttagccttgtttttaggaatacagccacaattagtgattgtccctcgtttcagtttttttgtattaacaaatgttatttttccacactcacatctacattcccatactttatatcgagcttctaatttatttgtttcagccaagacgagtaatttaccgtattttctgccaactagacttttagtctttttcattaattgaatttactttcagcttagaagcagataaacaaatttataattaaacaacataactgtgtcctcatttattcgttcatccctcctcaataattctagtactaataatgtaaaattgtgtttatacctgtcttgcacatagtacaaattcgtccgcataaagtagactttatcgttcaacaaatgtataatgaaaattgacagatagtacatcaaaattaatcatagtagaaagaaatttgtgtgtttttatagttttttcgttaaaaataaagctttatcttttcgaatgaataagtctactattttcataataatcatcacttcaaatgaacccatcttaaaaatgtatcttgagaaacattaatagtagtggctgcttcccttgaggtgatttttttatttaaccatttttcctttaaatcataaaactcttctggaacaggaatgcacggtctaccaaattttacacctctttttttagcagcctcgattccttcacgctgtctttgcttgatactttgtcgctcggtttcggctacatatgaaagaatttgaagtactagatctgcaataaatgtccctgtaagattttcttttcttgttctagtatctagtagtggcatatctaaaacaacgatatctgcttttatttcttttgtaatgactcgccattgctctaagatttcttcgtagtttctacctagacggtcaatctctttaatcactaaaatatcttgctctttcaatattttaattaattcactgtacttgggtctatcaaaatccttaccgctaaacttatcaatataaatattttccttttttactggaaattgtgataaagcaataatttgccttgcttcattttggtcttttgaagaaactcttgcataaccataaatatttgtcataaactaaaacctcctaaatttatgcagtattataaaaatatctgcataaatattattaacaagttatgataaatctatattactgaatataaaaaaagttagtaataagtcgatgttactaactagctagaaatattattactttataaattgattttaatgaataaataatttattaaaatcaaaacaggaaatatcaagataggagaaaattatgactaaatcaaatacaattattgaattaaaaaacaaggtgtagttgcagtaattagaggaacaagttatgaagaaggtcaccaaacagccaccgcttgtattaaaggaaatttaaaagctattgagattgcttatactaacaataatgctgacatgattattaaacaattatcaagtgattatcaaaataataatactgttttaattggtgctggaactgttttagatgcaccaactgcaaaaaacgctattatggctggagctaaatatatagtatcaccagcttttaatcaagaaactgctataatttgtaatcgctatggtattccttatattcctggctgtatgaccattaaagaaatcattactgctatggaatatggctgtgaaattatcaaattatttccaggaagtgcttttggtcctaactatattaacgcaatcaaagggcccttaccgtatgtttccttaatggtaactggtggtgttaacctaaataatgcagctgagtggtttaatgctggtattgatgctattggcattggaggagagttaaacaaactggcagctaaaggtcaatttgaaacaatcaaagaaattgcacaaaaatatgtaaatactaaaactagaaaataattcttatatctcaataatataataaaaaactattatttaatattttgttataaaattagattataagagaactcccaatattactaataattcaaaataaaaatactttttgcggctatctaacactttgtgtaatcaaacttatcaattgcagaaataaaagatttctgcaataaattaaatactaatataaattaaggagtaatttctgaattgaatagaaactactccctttaatttgattgtaattatttaaatagtataatacttgacatagtcttatattcttatctataaaacactttttatgattttaaaaatatttttataaacgaattatttaaataatttttacatattaagatgcacccctttcatttgaatatacatgtccaagattccaagtatatatcaaactttggggtgcacttcattttaataagaactttttaactgcgagatacctataatcataaatattacatttcacaaaaactatattttttattataagttattagagactccttttttagctagtctattgctacacctgcgcttacataacctgcaacagtgttgactaaactcaatccagatgcccgtgcagttaaaacaagcattaatcttgttcccgccggaacattaatatttaagccagttaatattcccttagaaatcgttcctatagaaattacacctgttagtgaaggcgttaatgttacagttgttccaggcactacagtcatagtgttgtttggagcaattgattcatataattttgcttcaatcgtaattgtacttcccactaatgataatgctgctgttgttgaaaagaatacatcgattgaagtgatgactccatctcttggcattgtaaaagcaaagtttgttaacgtgccagatggattggttaaatcaattgtattaccaatgattgatattcctggtgctgagctaccaaaccctataaatgcaggggtacctactaaaccaccagcaatagttgttaaagatacaggtaaaccagatgcaaatggtattattgctgaagctccagctgctcctgttgatccagtcggtccggttgaccctgttgctcctgttgctcctgttatcccagttggtcctgtcggtcctctatctccgtttgcaccatttgtaccagtcggtccggttgaccctgtcgctcctgttgctccagtcggtccggttggccctgtcgctcctgttgctccgtcttctcctgttgctccggttggtccggttggtcctgtcgctcccgttgatccatcttctcccgttgctccggttggtccggttggtcctgtcgctcccgttgctccagtcggtcctgtcgctcctgttgctccgtcttctcccgttgctccggttggtcctgtcgctcctgttgctccgtcttctcccgttgctccggttggtcctgttgatccagtcggtccggttggtcctgttgctccgtcttctcccgttgctccagtcagtccggttggccctgtcgctcctgttactccggttggccctgtcgctcctgttgctccggtcggtccggttggacatctaataataattggtggcctgcatcggcaacatggacaccatatacaaccattataattacagtctttcatcttatcacctcctttatgtgatctaatataatatacgcaaatattttaataactactgtgtcaataatctcataaaaaataaaagactaattttttcattaaacttctaaagtaattatctaaataaaaaagttactagatacatatgtaaatcgtatacccttaacgccttataaaaaataatagtttatcatattataataaaaggacttactcctttattaaggattagtcccttttaaatctttttttacttctattcatcattttcaatacgattaaaatacaatttattatgcaaatatgatggatcatttggtttacattttcctgccaattcattgtaatattttgctgttttataattacttagcttatcataacataaacataattgcatatagggaatataatcataacaatctggagatataaatgctccagatgtatcatcacgctcacacgataatgctactgcactccaatagatagattgctcatactgcttcaattcaaagaaatacttacctaaatcacagcatatctctgctcttggcaaatcatagcaaagactatttaaaagccaggttattgcttcttgcatatcaccaagattgtaaaaacaatagcctaaaaattgacaggcagaaatgttattttctttccatcccttcttggtatttaaaaatcttttaaattcagctactgcttcttgatacaattgatgataaaacagctcccgagcataatagaaaatttctcgtggactaaacattaccccttcattcaatttttctctaaatattcttaaattacgattaacatcactatttttcaccttactatgtgtaattgcaagatcactataaagcaccttacctctaggacttattacttcatgtataaatccttcccaataaaaattatcctttcttcttaataatctttcacgataatacgtaaatgtcggcttattattctgatcaaattctgcattatatttcatcataactacagaagtatcttttgataaagtttttttaagattaatcaaaccttcttgatcgctatctgaaataatatcatccgcgtctaaccacatgcagtaatccatagttgcctttgaaaatgaataattccttgctttagcaaaatcatcacaccatacaaaatcatatactttatcagtatatttcaatgctatctttttagttcgatcagtcgatccggtatccacaatgattatttcatctgcaatcctttcaaccgattttaaagctctctctaataccatttcctcatcttttacgatcatacacacactaatagttatcatatatttcaccactataatatatgtcaacaacccttaaaatgtgaaaatatttaaaacaaaaaatgttctaaataaagaacatttctaaataatcttagttgagcattcttctaaattaattacttcatcaacaattggtaaataaaattccggttcatgactaactaaaataacagctcctttaaaagccttgattgcgctttgtaaagaatctttagcatcaacgtccaaatgatttgtcggttcatctaacaccaaaacattagcttcacgattcataatcttacataatctaactttggcattttctccacccgataaaactttcattaaagattcaatatgatcagttgttaaaccacacttagctaacatagctctaatctcaccattgtttcgatctggaaattcctcccacaaatagtctaatgcagtttgggaaactgcagattcttcttgtttaaaaaaaccaatttcaacaaatggatctttttctactgttccactataaggtttttgcatcccaatcagcgtctttagtagagttgtctttcccaaaccattgacacctttaatagcaactttcttatttctttcaaaaacaagattcatttctttcgttaaaggactatcatatccaatcactaaatccttacaatcaaataatactttacctggtgttctagcttctataaaagaaaaagtcggttttattttttcctttggtttagaaataagattcatcttatctaatttcttttgtcgtgaactagccatattacgagtagctacccgtgctttattacgtgcgataaaatcttcaagatcagcaatttctttttgctgcttttgataatcagcagctaactgacgttttttcaattcaacttgttgtaaatagtagtcataatcacctttataacgagtcaatacaccatcttctaaatgataaataatattaataacttgatttaaaaaactaacatcatgactgactaaaataaaagcattatcataattctttaaaaaattgattaaccaattgatatgctgctcatctaaatagttagttggttcatcaagaattaaaatcattggattctctaataataatttagttagtaaaacttttgaacgttgcccaccagatagcgcatcaaccggtttatctaaaccaatatcattcaaccctagaccacctgcaacttctttgattttaacatcaattgtataaaacccgccatgatctaaaatttcttgaatttcaccaacttcttccatcaactgattcatcgtttcatcatcacaatcagccatttgttcatacatcgataacatctccgcttctagatcataataatatttaaaagcatcttgtaatgtttcatatatagtttttcctgggtgtaaagctgtgtgttggtctaaataacctgttgaaattcttttacaccattcaatctttcctgaatccggagcaatcttaccagtaataatatttaaaaaagtagatttcccctcaccattagcacctactaaaccaatatgttcgccatttaataatctaaaacttgcattttctaaaatagttcttccaccaaaatcatgactgacattttccacacttaatatactcattttctacctcaacttgcaatattaaaggaagattatcatcttcctaattcaactatattatacattaaaattactaactgtcgagtctaaacaatcactcaattgaaaagccatagtatccattctttccattctctttaacataatataaataataatctgcattattaattaattcctctttagataaacaattactaaaagaattataatatccagatgaaatagtgattttatcatacccatataactcaaatttactataaacttgttcaataaaactaattatcatttgctcattacaatctacacaaatacaaataaattcatcaccgccaaaacgacaagaaattattctatcatcatcttgttgtaaactatcagcaaaatcctttaatatttgatcaccagttaaatgacctaaactatcattgtattctttaaaatgatccaaatcaaaaataataattcctaatagtcgacttttatttttaaactcactatatttataatgaaaatatcgtcggttataaatcttagttaaatcatctagtctagactccttaacgatatcttttttttcttccattgctttaaatagttcaattttatataaaacactatttaaacaaaaatcaatactttctttttgattttcatgcatcaaataataatattgttcatataatttaggcaactgttctttttcttcaaaaacaatacaatactttatcttcatttctaacatttcaatttgataacgcattccagttttaccaaaatcattctcctttaataaaagataaagacattttgtccgctccttatccttgattgcaaaagtaatatacaataaaatatgatgaataaaataaattgcttcatttgcacgaaaaccatgaatctcattccctaatatattatcaataaactctaaagcttttgctacatcaccatgcccatagcaaattaatgcttttaatgcttgccataaccgatcaatcggatcaaatgaagtatcattaaataaatccttattttcttccattagagcaatcgcttgatccaatcttcttttttcacaataaattataataagataacataacacaaaacgttttattttatattccggcagtttaggagaaatctttttgatctgttcaagcgattctaaaaaataaggtaacgctaaatcaaattgacctaaattaacaaaaacatctcctaaattacagttaaattttgctttcattatatagtcatttaactgctcagctaacttcaatcctttgagataaaaaccagtagcaagagaataatcattattacatactgcaatagcatataggttgtaagcctgcatcaataaatctggataccctttttcttcatttagagccaacatctcattcgctaatttaactgtttcttgttgcgatttacaagaataatagtaatcgattatgtaattactagctaaacataatatgtaatcatctttttgttctagtgctatttcttttaactgcaaacatttttgatacattttctcgatatcatcaaactgtaaatgacggatttcttcgactaaacgatctatctcacgcattaatttctcctttctttaagcactttgatttcattataacataagatagttctaatattggttaaaaaattcctagttttaactaggaatcgtatatctaattatttaaaaaatgttttataatcttcataattttttttcaacaattcaggtgtatttaatccatacggacaatgcgacatacatttgccacaattaatacaattttctatttttttcatttcttcttgccaatgttctgacaaccagcctgcactaggagctcgtcgtaacatcaaagacattcgagcacactgattaatttctattcccattggacatggcatacaatatccgcaaccccgacaaaattcaccagataactctttttgatcatgagcaattatcgctttgatttcttcactcataattggtggattatcattatactcaataaattcatctaactctgattctttttgaattccccaaatcggcaatgtattatcaaactgcgctaaatacgcatatgccgcatcagaacggtctattaaaccacctgacaaagccttcatacaaataaaaccaacatctttttctttacataaatcaactagttcctcttccttttttgaagccaaataactaaaaggaaattgtaaagtatcatataaaccacactcaacagcttctcttgctacatgtaaacgatgattggttaaaccaatatatctaatttttccttgtttcttagcctctagcatagcttcatataaacctgatccatcccctggcttaggacaaaacgacggattatgaaattgataaatatcaatgtaatctgtctttaataacgataaacttgtttctaaatccttccaaaaatccgttactgtcgttgccatcgtttttgttgaaatataaattttttggcgtacctcactaagagcctcaccaatcttttcttcactatcgctataagcccgagcagaatcaaaaaaagtaattccattatcatatgctttctttaaaataacttttgcttcttccatatttactcgttgaacaggtaaagccccaaaaccatttcgattaacaacaatatttgttctccccaatcttactgtttccattttcatcctcctacaattcgacatttcctatttttattatactcccttgagtaaactttaagtcaagtaaaaaacgaaaggttttaacctttcgtttcatcaaaattatgattaataatttctaataatctgaactcattatcttcaaattcaaattttaaaatacaacaattcttcaagccgcctttttggtcaacttgactagtttcctgccaatatctcataaaaccacgacatgccccaccatgagaaactgcaagcacaactttatgatcttccttctgcataatttctaataatgtatcagcaattctttggcgcatctgtaattctccttcaccgccataattgacaaaaaaatcaccatatggcagcggcggatttaaatcttcactttcaccttcatatattccaaaattccattcctttagtcctttgactcggtgataaggtaaatcacagactaactctaaagtatcacacgcccgctcagaagttgaactataagcatgatcaaaaacgatgttattgtctttaaaatattttcctgctatcttagcttgtttaattcctaactctgtcaaaggggcatcacaccacccttgaatttttttacgagcattaaatagcgtttgcccgtgacgcattaaatatagagtcttcttcacccgatcagtctcctatttttactattttatttgtggaaaaaccacaaccaataacattttaaatgcttcttgaccatatacagaatgcggtttattagccggcataactaatgtttcaccacgctttaagacatattcttgaccatcaactgtaaactttccaacaccctctagcacggttaccatcgcatctccgctagagccatgcgttccaatttcttcacctttatcaaaagaaaaaatagtaatacttaaagcatcattttgtgctagtgtcttactaactacttgtcccgcttgaacttccacttgcgatgctaatgtagttatttgttcatggggaatatttttaataaatatatcgctcatatcttacctcctatcaatatttattcccaagatatgtttatattatagcataaaagttaaataaagcgattaacgatactgcttcactttaaaatgatagtttactatcttattaagataatctaaatcatttaaatcctgaataaatcttgtggttagctctaagtcaagataaaataaaaaagtgtaatctcgctttttatttatataaaaagcgaggattgatcattaataagaagttataataaagagggtaatataaatggaatggattgaacggctaaatacaacaattgaatatatcgaaaatcatttaacagaaaaaattgattatgagcagctcgctaaaatagctggctgccctagttatcactttcaaaaaactttcctttacatgactaatatctcattatcagaatatattcgcaaacgacgtatttctttagctgcagttgatttacaaacaggagaagacaaaatcattgatatagctttaaaatatggatatgaatcaccaaccgcattcaaccgtgctttccaagcagttcatggaattgcaccctcacttgttagaaagaaaaatgttcaaatcaagtcattcccagctctaaaatttaccttttcaattcaaggtcttgatgaattaagttttagaattgaaaaaaaggatagctttaaaatcctaggaatcagctctcttttaagtaaagaattactagaaaactttgtccaaatccctaagcaatgggacaaagcattaaatgatggaacccttaaccaactttatcgacttaataatcagactccgctaggattattaggagtcaatattcatcaacacgaagactggcgttatttcattgctgttagttcaactaatcataatcaaaattttgaagaatatcatatcggcagcgctacctgggccatcttttctggtcacggaacaaatagaactcttcaagagcttcagcgtcgtgttattacagagtggttgcctacttccggatatgaatatgctaatatcccagatatagaagtttatctaaaagccgatccaaatgatgccatttacgaatactggttaccaattataaaaaaataaggagttatgttatggtaattacaaatattaaggcctcttttcctaacgatataaaaactatttggaatattgttacttccctagataattatacttggcgcagtgatctttcaaaactggaaattatcaaatcacaagagcaatttatcgaatacactaaaaatggttatccaacaacttttacgattacctgttttagaccctaccagcgttatgaattcagtatggaaaacagtaatataaaaggtcactggataggattattttcatctcacaatggtattacttcaattgattttacagaaaatatcacacctaaaaaattcttcatgaaaccctttgtcaaaagatatttaaaaaaacagcaagctgcttatattcgtgatttaacagctgtcttagaagcaatagaacatcgattttaataacaatcccaattatacaagacttttgagaaattcttattctctaagtctttttttgttataaagaaattacaaataccactatccccccacataatctctttatcaccaatacctacactatcaatttgtagtaataaaatataatcatcgtacttttcactactgcgggggtcttcttgagtaaatgcaggatatccaaacattttatgcccaaaaccgctaaattcattaaattcatcctcatacaaaatttcatccggtaaatcataatatgatgaaattaaattatttgggtataagttattccattcttgtgtaaataaaccatcaaaatgataatcaccaatacttattccttcttcgccaccaataaaatgcagcttaaagttatcaactattggaaaataaccctcaccttcaggatgatatttattaagtatctgactttcagatacagttttatcaatacttgaataataaataacccgactttctgcttgcgatatcatattctcaaaatctaaaccataaagatcattatccatagcccaaaattgcaataaccctgcttctaattgataactattcatcggtaaatcagcaaaattaatttgccccagcaatcgtaattgtttattatctgtacttaatggtacttcgtcatctactcctaagtatggtaatcccccaaatttactatcaaaaatactacactcatcattacttaattcaattttaataacatctctttgagtatagtctgtaatcaccttcatcgtacttaaaaacatttctttattcatttctagttttcctgactcttcgactggatcttttttctttttaaaaaaatcaaacactcaccatcactcctttcactaaaacataaaacagcagcttccattatcatttctttatttaattttagcaccttcttaaaaacaagcaaacaaaaacatctcgataatttataatccgattaccgaaatgctttttaaatatctaaaaattataattttaaatcatgcatggcaattacttcgaccaataaagcaataccaccaacaagtaaataagcagctacaatataatttaatacgacggttgacatcaatggcgcaataataaatgctaaagctgctaaaacattgattatacccgtaaatataacccaaccataactttcaattccaaaaaagcttaattgatgagcaaaactcaacttattaagcccataaaccattaaaataaatccaaaaataaaagcaaatgtattaattgtcatttcaattggtgaacatatcaacaaaagaccaattaataaattacaaatagcacttacaaggccacctggaccacgaaataatggtggtgccgctatataatcaatgatctgataaattcctaaaataagaattaacccggttgcaatcgtaccaattatagtaactgattttactggataaatcatgcatagaatagcacaaataatcattaaaatagcaacaataattcctgctactcttaatgagtgaatctttttattccactttccaacaaattcacttcgaaaatcaaaatcatcattaaatcttaacatctctatcaccttctatacttatattatagtcttcaaaaaataaaataatataaacaaatttgtccttttgtctaaaaaatcctatactataattggtttattatgttcagatacggtatattaagcactgcttcaatcattgatcgttttattgcagggattagagaaagccaagatagctatgttcaagcaattgcatcaagaaatttagaaactgccaaaaaagcagcaaaacgattaaacattgaaaattattatggcagttatggtgaattgctttgtgcaaataatattgatattgtttatattcctacagttaacagtcaacactatgaaaactgcaaaaaagctctaaaacaccataaacatgttattgtagaaaaaccttttgctttaactgtcttagaagctaaagaattattcacattagctaaaaaaataattgttttttaatggaagcacaaaaggctctctatcttcccacaacaagtaaagttaaagaattaatcaatagtgagataatcggaaaaattaaatacttagaatttaaggctgggtttccaggtcgctttacttacgatcactggatgtatgatctatcattaggtggtggtgctctttatggaagtgctacttatacaattgaatatctccaatatctttttgatcatccaaatttaacaattgatggtacatgtatcaagtgctctactggagcagatgaaatatgtaatttccaattgaagataaataatagtattcttgcttcttcaacaatcgctatgaatgtggcattaaaaaatgaagctgttttttatggagaactaggttatatcgttgttcctaattattggaaatctaatcagttagatctttatctcgatgatggcagtcatagtcattatgattttccttatcaaagtgaatttgtttatgaaattgaacatattcatcaatgtattaataatggtcgattagaaagtcctatcatgaataaagaaaaaactattgaaacaattaaacttgttgaacagttatatcaaaaatggaaataaaagaatctttgccataataaaatgaacctccattacttgtaatgtgtaccctccttactgatttgtccagtaaagagggtacacatcattgggtgtccaaataatggaagttcatttcaaattagaactaaaactttttattattagtaacagtggcataaaaagccacccccaaaataatcactcctccaagcagttcctttactccaggaatctcatgtaacaaaaatatcgcaaaaataatgctatacacactctccattcccgatattatccctgcagtttgcacctttactttctttaaactactgacataaatgctatgagcaacagccgtacatataactcctagaaaaataagcgcaaataaatcaagttttgttattgaagctttaactatcagcaatgacggtaataatataatcgcagcaattccttgttcatataagcaaatcgttctccctgtatatttacctgcaaaatagcgattcatcaagcataacaccgcataacttaaagatccgattaatccaataaagattcccagtgttatttgattgttaagtgagaactctggaattgtaattattaccccagcaaacattgttagcgcaatcattatattttttattctaagctcttcatgatatactagcggttctaaaaaagtcacaaaaagtggaaaagttgaaaaagtaattgttccaattgcaacagttgataattgaattgcttgtaaaaaagtgaaccagtgaagtgccataacaataccagcagcgatgattagaatataatcttttttattactcaatctaactttctctttttttattaaaattattattaatagaaaaattgaagaaaaagatactcgtccaaaggtaatcaaaatagctggtagtgtgacaaattttccaattactccggctaagccaaataacataacagccaaatgtaataatccaacttcttttttcatcactttcccctcctatttatagttaataatagtttagctcatttttaataagaaaaaaagataaaccacctatatcatcgctgttcattttctaaactaaaatgcaaggccaataactacttaaaaaccttcattataattagttattaataaaatatttaattcgttcaatcgttgactgagtttcaagatattcaggatacagaacttcaaaaacatgtcctaaatgttttccttagagcaacacacggttcaaacataccagttataagccttcaatacatttttagcctttattgactaaaaatgtaagttatctcactactaataatacgtgttgaaagtggcggtaactatcaattacatcaataaggcaagcttttcgatatatgtctgaatcttcattgttaactccctgaaccataacactaacctactgataaacaaaatttttactgttagtcaaaacttattaaatcatctccaccatgtaacaaaactctctaatcataatttctggtggctgaacattatatactttacagagctcaggctgttttatgattacataaaccaatcctgctaaatgcccaccagctgaatcactcagtaaaaataatttgatcaatattccaaaaatatttattctttgttttagcaacaaactttaaagtcataataatttcctgaacttactgcttcaacgaggcttgtggtattagagtataatttatattcacaacagtaaaatttttagcagctagcataactgcaaatttttatttactcctttatcaccataaatccaggcatcaccgtgaacatcaatgatcatagacaatggcttagtcgtggattaaggataataaatatctagtaaatgattatgattcctgtcatcttgataaggaatatcaactacttagtggacattttcgagaatagtaaaaatatcattactttttggttgcattttaaaacgagcaaacttaataattgatggataaaatagatttatacctatcatctcctcattgaattattaataccacactattatgatactctttagccccattttctctatattatcgtaaaaaaagcatcatttttaaaatgataccttttaaataacatataaaattatacataagaaatgtaacacacttcctaataagatccataaatgccaaatactatgcatatagcgatacttattttgcaaaccataaaaaacggtaccaatcgtataagctacaccaccagccacaagtaaccaaattccattatatccaatagcttccggcaatagattgaatttaaagataatacaccagcccatcgctaaataacaaatcattgaaaacttttcattactttcaatatcaattgcatttataatgattcctagaaccgtacagccccaaacaacagcaaagatcatccaagcccaaaatgaatctactggtcttatcgaacacaacacaataggtgtataagtaccagcaatcaatacaaaaattgaacagtgatccataatttgaaacacttttttactcttagtatttggggaaagcccatgataaatactactcattgtatatagcaagatcattgatattccataaataattcctgaagctataccataattgttatggcgcaatactccaaaaacaatacaaagtactaatacggcaattccaaaaactccacctacaatatgagtaaccatattaaaaatttcttcacctcgagtatattcgggtaatactcgatcatctaattttgttcgtttcattgaatacccccaatctatatgtatgaatatagccctatttcatgttaatttcaagaacatcatataataacttcttataaatttctttgataaaaccaaacttagtcacagtatttgcctgtcgattgcaaaaatattgttttgctaaaaatctttaattatccatttttaccttactgctataaaatatttagatatttaacaaattacactaaataatcatattttctaactttattatgacaatgtatacagctaaaagatatgtgttccctccccgcaaaataaataataattaaaattaccatgctggattccacaatagcgataaccagctttttgtatttgtttaaacagtttgatttattttcatccttcaacaaatagttttcaataaaatcatttaaatttctatgataagcactaatataaaagttcccctatttttattccatatcccagtcttgtcctcaaatatataactgttttgaagattttctactattttaatttctttattaaaattatttatactgtaactctcttttaaattttctaatttgactaataaatagatcattattttgtaaagaaatataaaaatctttttgctctgtaacaatattgagccgatccaaagaattagctgatgatgcaattgcatcacgacttttctctattcttataatttgttgataataaattccaaaatcttcagtaatccccctttccttttaatcctgattaaaatagtctttaaacaatttaatttattataacaccctaattagctgattcatcatttctatcacttaacgattcttcatcataaaaatatatcttaaaaagaccatttgactcaaattctcatttttcaaattactcctttatcgatataagtatatattgctaatcataacaaaacaaagatattctaattttgtaagtaaaattaccttgcttgattactttaccatccttagttaattctaaaacaaagacaatcactatccatatcctcaatctaattatattatctcataatcaataatctatcacgaattaaaagatgcctaacggcatcttaaactgctaaatcaaattatctagtcttttccatcaaataattagttaaataaacattatccactttgactgactgttctttaataactttatatcctcttttttcaaaaaaaggcttagcacttatggaagcatgaactgttaaactttttacatctttacaatactgttctaacttatcacatagctttgttgcaatctgttttccttgataatctttatgtacgtataaatgatctaaataacctctcttatcaatattaccataacccaaaaccttttcattttcaacagctacaagagtatacatagagttaaaaaagtcatcttgagtcagcagaaaattactccgatttgaccatactttgatttgatcattattgtaatcatatctatttattgtattaatcgtttcataaaacaattcacaaattacttttaaatccgaagactgatattttctaatttccatcgatttcaccattaataattttataaactctcttttttacttcacctaaatcttccttacgtaataaagggagagatcacatagtttttcttattcataatcttatcattttaaccatcccaacaattcgatcatttcattaccaaaacattcttgtctaaaatgagccgaattctctccaataacagaatatgctgaaatatctttcattacaactgaatgaattacaataatccttccatcatcattttggcgcataatcatatttaaaattaccattaaatatttatatagtaaactgcaattatatcattccttttacttctttaattaaattaaaattccattacaatgatctatttcatgttgaatgatctgagctgtataattactaaaagtttttattttctttttgaaatcaacatcataatatgctacttttatcttttcgtatcgctttgtctttttcactccaatatgtgatagacatccttcttctgtttcatataaacgtcccatagtttttataatttctggatttaacattactaaataattaccatcatcgtttacaatgataatatttttattgataccaatcatattagctgccattcctacacaacctgtagcatgagctataatcgtatctaataaatcttgaacaaccggtaaatcctctttagtagctggaagtgatttttgacttagtctaaattgatcactaactatttctcttatcatttattttcccctttatattgtcttagcaaagcttgatgtttctttaataatgaagctgaatatactttctttcctggctgatctctaataaccttccacaatatcgaagcagctttcaatttattataataaattttattattttcatcacgacaaaaatcttttaaaaactgattccactgacaagctgaattatcatatttagcataatcactttttccataatacacatctaaaagatccttgagcgtgaaattaacattcccctcacttcgaacccttctcaatgcagttgccatatctgcggtgaacttaaaattaggtgtttttgtaatttcgccaaagaattcacgaaaacgtccattaagaacaaagccacattctaataattttgtttctaaggttaaaggcacatcttgcttccttattttcattcgttttactggtttaattatttcaccattaaaataggctttaatattatcattcagttccgttttagtacctgtatgagtaattccgtgttctttacaaatttgttttagttcatcacgataccaataatactgtttaaattcatcaaaactttgaatatcattaaaatttggacgtgtcatttatattctccacccctgtcttttaatatcatatcatctatagctatttatctcaataaaaccatatatcatctttatatagttcaccccttagttggaaatccaactaagaggttcaatttcattattattaaaaatcatttagataaacagattagcacacatagtgaagatagaacaaattatgattccggttacagctggaactaagaaagatacaatcgcccatttccaactattagcttctttttttattgttaaaagtgttgtcgaacaaggccagtgcattaatgaaaataacattacattaattgcagtgatccacgtccagccattttctactaataaactttttaacattactaaattatccatttcaatcaaactaccactagcgaggtatgccataatcatgataggaattactatttcgttagcgggaaaccctaaaataaatgctaacaaaataacgccatctagaccaatgcatttagcaaagggatccagaaaattagaagtaatatttaaaattgtcataccatcaacactaatatttgccattaaccaaataataagaccagcaggagcagctactgccacagctcgagataaaacaaataatgttcggtcaaaaattgatctaacaaccactttgccaacttgaggtttacgatatggtggtaattctaaagtaaatgaagatgggactccctttaatatagttttagataataactttgaaataatcaaagtcatagttattcctaaaacaattaacattgttaaaaatattgctgataatagagaattttgcatagttgcttcggttccaataaagaacattgttaagattgctatcaaggttggaaaacgaccattacatggcacaaaattattagtaatcattgcaattaatctctctcgtggtgaatcaataatccgacatcctactattccagcagcattacatccaaatcccatacacatcgttaaagcttgtttaccacaagcgctgcattttttaaatgcatgatcaagattaaaagcaattcttggtaaatagcctaaatcttccatcaaagtaaacaatggaaaaaagattgccattggtggcagcataacacttacaacccaagctaacaccctatataccccagatacaagcatatcactaagccataacggcgtcccaataaaatgaaagaactgattaaaaggtacttctaatccaaataagaaatccgataaccactgcgatggatagtttgcccctgttatagttatccaaaatattaaagcaagtaataaaatcatgattggataccccgtccagcgatttgttaaaatcttgtctatctgacgatccctttgattataatcttgcttttgatagtgaaccactttttgacaaatcaaatgagcactgtgaataaatgaaacaacaatcttgtcttgtaaattatccttatttatatcatgttgtgctaataattcatttgcttggtcgatagcttctttaagctcttgatcatcgtagtccagtcctaattgatttgacatttcaatcattaaggaaggatcgttttcaatcaatcttaagctaagccactgataacttaaagaagtagttactttcttttgcaatacttcctcaacaattcttattgcttgtaataaaatatcactataagctatttttaaggatttgtaattaactggtctatcgattgcttgatctaaagaatcaataactttatgcaaatctgtcttttttctggcagtaatcccaattacaggaactcccaagcaagatgataattgctcaagatcaatatcaattccttttttcttagcttcatctaacaaattaacacaaactattacatttgtatgaatttcaattgtctgaattactaaatttaagttacgttctaaacaagttgcatcacatacaacaacaattatatctggatgctcaaagcaaataaaattacgtgctacttcttcttccgccgaatgtgctaataatgaatatgtcccaggaatatctactaaaacatatgaattttcttttcctcgacaatagccttgagcattagtaactgttttaccaggccagttaccagtatgttgatgaaggcctgttagcccattgaaaacagtgctttttccaacattaggattacctgcaatggcaacaactttatcatttctactttgtttttttattactaactttgtctcacttgcattaattcctgtagatttgttagttaagcccataattcacatcatcttttctaattaaaacattttgacaatcttcattccgtaaagcaattactgcacccctgatcaaaaaagctttaggatcttgacttggactattcaaaatacattgtacttccgtatcatcaactaagccaatatctaaaagtcttcttttaatactcccttgtgccattaatgaagtaatcactcctacttcacccatttgtaaatcatttaaacatctattttctatcataataaatttctcctcatcgtatattagattaaggaaactttgtttcctaatactataatattaaattactagtaaagcgttactaaaaaggagaaaaaaatgaataacgatgaaaatgcctattttactttcaagggctatcaattgaataatgacagtaacttaacttcttcaatggaagattatttagaaatgatcattcgcttaaaagaaaaacaacccttcgttagaatcaacgaattggccaataatcttaatgttagaccctcatccgcctctaaaatggtaactaaattaagtcaagaaggctttttagaatatcaaaaatatggaattatcacgttaactgaattaggtaaacaatggggtgaatattttatatatcgtcatcaggtattaaataactttctctgtctactcaataacagtcataacgaactagaacaagttgagaaaattgaacactttcttaataaaaaaacaattgataatttagccttgcttactaaagaacttcacaatctacaataaaaacaacaatatgggaacaaatccattaccatactgtcgtcttactttttatcgaataaaattagtgaatttatgctcctctttttccggtaatccaaattcctttttacctaattgaatacttttaattaaaaaagccatattcttaccaagagttctcatcgtttgtagtccttcaaggtcctgctgtacttcttctggtgaattaccatgtaccatattccaatattggctagaggctatcggcatttgagaaatagtaaaatatttatttaattcatcaaatgtagcactattaccccctcgacgacaactaactacagccgccccaactttcattgttttatcagcagtcatactataaaataaccgatcaataaatgatactaaggttccatttgccgacgcaaaataaactggtgaaccaataacaatgccatcacattctttaaattttggtgcaatatcattaacaatatcattaaatacacatttccctttcgtcttacattgacgacaaccgatacatccacgaatatctttatgaccaacatgaataatctcagtttcaatcccttcactctttaaggtttttgatacttcctctaaggctgtatacgtacatcctttagcatttggacttccattaattaaaataactttcatttttctatcctccttgatttctctttttatttatcttacaattatattgtaatactcggtagttactaccggtcaataattttttaaaataaatcaaaaataggggtatttattatgtgtacgatgaaagaagtatgtaaagaaattggtatgaattatgaaacattaaagttttattgtaaagaaggtcttgttcctaatgtaaaacgagataaaaataattatcgtaattttgatgagaaaaatattgcctggttaaaaggaattcaatgtttaagaaaatgtggattaggcgtaagtgaaataaaaatatatatgaattattgtttacaagggccaacttcaattccccaacgtaaagatatgcttagccaaacaaaagaacatttgttaaaaagaattgcagaaataaatgagtgtattgaatatatcgataataaacaacgcttttacgatgacgtacttgaaggaaaatgcaggtacacaagtaatcttattgaaataaatgagtaaatagctttgataattaccactttaagaaaataagtctttatcttttgtcactaaaagataaagacttatttctatattagaaatatcctactcttcttcaataaaatcaacacataattttgtaattccgcttaacatataagagctggcttctttaatataataaaattcaggtaaaaattctttatcaataaaagaggatagcacattttttacttcatccatatccggtgtcattggtgaacttatcactacagcttctggtccaatgagcgaaatagttggaagtaacgattttgttacgagctctacggctccatgctgtgtccaagccagtttatgaacatcatcagataattgcatccgtcggataaaatatcttatctcacctgctataccatttttccctctaattactttaccattagaaattattccttgtccccctaccccaaatccaaatggctgtgaatggaaaataatattatcatactctggatgttctaaagaaaaacctacaactgctgcatttgcattattataaacgaaaacatcaattccatatttatcttcaaaatcagcttttatatcaatagttcttccatctgttggttctttcaactgcttttcatctttaacaatacccggtgtcgcaattccaatcatatcaatgtaagaatgttttaataaaatggtatcaataatatcgtagagatcgtatatattcattgtaggtttaatgacaaggttactatcaattatttcacatttatcatttaaccgataataaatacgtgtctgctctctactaatcaaaataacaattgataagatacgattttcatattctgcacaatgggtacattcatgcgcttgctcattacttttttcttggcggaaaatctcaagctcactttgaataaactttaaagcagctaaagcatcatacgaagcaaataccgatgttggtatttgtaataccggcttttctgtgatactctcttttaaacgtttgagcatatacccaatttgtggtgcaattaaaattacatcatacttttctgcttcttcataaatactcatataagatactgcatcaaaatggtaatctaaccctaacattcctgctacagaatttaaattatcagcaaacatagaagttgtaagtcctgccgaacatgataataaaacacgcaaagttttttcttcttttaacccaatcaatgtttcaaccatctcatcatataattgctttgcatgattttcatcattgagttcaaaatgaagatagaatttaacagaatgatccttatttgaaacaatactaaattcaacgattgtatattcctcaattactgtaaattgaatcgatgcctcaccgtattcagttactaatttaataagatcatcgttttctaaacgaatctcatatggagtattatgatgctctcgaatccaacctttaaaatcaaaaaccgcctttttttcagtcattttatccctcttttctctttataattttattttaacatccataataatgaacatcaaataacattatctttatgaccaaataaaaagacgatacaatattaattaacttaattgtaaagtcttttttattcaacatatttacgattgtctttgccaaaagtaaatggcatcatctatccaaccttcagctattgttcctgtgcctaagccaaatccatgtgatagacccttataacaatgaaactcagttggaatatttaatttatttaggtgctctaaccgttttttcataagaatatgatctgcaatataatcgtttgttccaatacatgcataagttggagcatcttcatttgaaacataatcataccctgtatactgcataatgacagcttcggctgaagggacagcaatttcactatatgaagataaaaactttttatttcccaatactgctgccattctagcaccagctgacccaccccaaagtgaatagtgtcttttatctattttcagcatattcgcattattatatataaacgaaatagccttagctaaatcttcatacggatgctcaacacgataaatcaaagcaaaagcattgtacccacgcttacttaactctaaagcatgtggaaaactatcatgcattgctcctacatatacaaaaccaccaccagcattgcatattgcaaaaggcgcatctttacttcctttaaaaaagaacaatcctacatctctttttgaagcatcatttaataattcttctttagaataaatgttataaaatattgaatgattttgagcatcgtgattgagtgtatttataatctcaattgtcttattcacatctatataattataccataaataaattttagacgaacttaattctttaatcgtcatatttagagctatcggtctattgattggaaatagtaaccttccccatgttttaaaggctggaagttctaatacttcttgaatagtagtattttcacttatattcatttttaatgtccgccgaagacatcaaaatcaattgtatctaataaagcatcaatttctttgatttcatcaattgtaacttcaatttcccctgctctaaaattttcttctaaacgttctaattttctgcttcccgggataggcacaataaaatccttttttcttagcatccatgctattgaaagttgagccatagtacaatttttcttttctgataatacttttaacaaattcaataatttttttgctttttcatacccttctttttgatattgaggcatattatttctaaaatccccattttcaaaggtagaatctggtgtaaatttccctgaaagtaatccattagccattggagaaaaagctacataagttattcctaactctttacaaacaacgaataaatcttcataccatctagccatcattgaatatctattttgaatagctgtaactgggcaaacagcatgtgctcttcttaaatattcttctgttgtctccgaaattccccatgctttaattttacccgctgcaatcaattccttcataactccagccactacttcaggttcaactttaggatctatcctatgttgataatataaatcaatataatcagtctgtaatttctttaatgatccttctatcgatgcatatattttttctggtgaggaatctaattctaaatgatcccctttatgttcaactccaaatttagttgcaataacaacctgttctcttacctcctttaatgcttcacctacaagctcttcattataagaaatagttccatcagtattctcaccagtataacattcagccgtatcaaaaaaattataacccattttataagcctgcttaatagtttgaattgctctctctttatcttcagctaagccataagcatgagaaaatcccatacagcctaatcctatcggactgacatacatattcgttttccctaactgtctttttatcatcatagcattatcctttcttattcagtaatcatcccacgataattcattccatataaatttgcaaaacgctgcattgtatattctcctgcttccaattgttgtttcgttggagcataaccttggaagataaaatacatgtttttaccctttaataaactttcatcaacatgttgataaaaccggtctaatagattacgaacagctccagacatactatgccaataaagcggtgagccaattacaattgtatcagctttactcatcgctaaaacaacttcatcaaattgatcatctgtaaaatgctgaccataactataaatcttataatctactaaatgcaatgtctgataatttttaccctttagaaattgctcacttaaagcaaccgtattaccatttttattaggacttccgttaataaataatatactcatttttttcactcctttaataatctattttttattcatggattttcctatgaacaaccatccttacaaaatcaggttcaaagtgtttagcccgtgaaccactatatcccatatctaaggatgaaatttttttcatctcatcattattcaactcaaaatcaaatacattaatattttcaataattctctctatatgagttgatttagggattacaacaacatctctttgaatattccaccgaagtaatacttgacccactgtcttatgatatttttcagcaattccttttaacatctcatcttcaaaaggattatatctaccgcctcctaatggtgcccatgcttcaggaacaacatcataatatttcattgtctctattgcttgctcctgagtaaaatatggatgcagttctatctggttaaccattggcttaatttctacaatttcacaaaaattcgttaatatatttggatagaaattagaaacacctatagctcttaactttcctttatgatatgcatcttccatagcccgccatgcagcaaagtaatctcccattgcttgatgaagtaaatataaatcaaaatattccaatccactttttttcaatgaattttcaattccctgttttgctgtttcatatgttcgcatatcttgcacccataattttgatgtaataaacagctcttctctcgtacagattcccgcttcaatagcttgcttaacagcatttcctacagcatcttcattcatataagaagctgctgtatcaattaatcgataccccgctttaattgcttgaaatacagtttcttgacattcttttttatccggtacttgaaatacccctaaacctaaaattggcatttctatttgattatttaaaataatatattccataatcttatcccccttattattcctcaccgtcaacatctggaattgttgttgccagtatatgctgtgatttttcagttatttgataaaatggacaatgtttatttagttttgctatttcatgcatttcttcatttgttagtacaaaatcaaataactcgatattttctaaaatgtgattagcacttctacttcccggtactgcactaaaccccatttgcgtgtgccatttcaaaataatttgagacgttgtcttatgatatttaattgctaatgctttaaataacggttcatttaacaattcattactaccatgccctaaaggataccatgattgtagaataatccccttttcaaaacaaaaatcttttaccttttcagccggataataaggatgacattcaatttgcattactactggtttaatttcacaaatatccaaaatttcttgaatttgttcaaccttaaaattagataaccctagtgctttgattttcccctccttataagctttttccatcatttgataacccgcaatataattatttaaagggtgatgcaacagcatcagatcaatatattcaactcccaaccgttctaatgtttgctcaacagcattacttttttcataaaacgttggagctaattttgtctcaataaaaatttcttttctatccaatccacttttactaatacctctacctacacttttttcattagtatagcgattagctgtatcgatcaaacgatacccattttgtaaagcaaaagaaacattatcttctacttgtttaccaaactgtccaattgttccaaaaccaatgatcggcatcttcacaccattactcaattcaattattctcattaatattttacctcctagtatattgtagattctgactagttcactataaagctatctagctttcatcttgctttaataatttatctttttaaaccacagatcatctcaacagttgctggatcatagtgagagaaaaatgaactcgtatctttattcatatttgtaatagttttcatatcttcttcacttaattgaaaatcaaaaatatcaatattttctaacattctttcttttctcaccgttttagctaatggcacaattcctctttggactaaccatcttaaaattacttgacctactgatttgttatatttttcaccaattcccattaatgtttcattagtgaagattcccttcttcccctctgcaaacggtgcccatgcttctaattgaacaccatatttttgattatattctaatgcttgattctgttgatgaaatagatttacttccacctgattcactgcaggaacaacatctgtatctaaacataaatctactaaacggtccggataaaaattagatacaccaaccgctttaatttttccttctttgtataaatcaactaaagcccgataagcaccatgataatctttaaaaggctgatgcaataatactaggtcaatataatcgagtttcatcttttctaaagattcctccaccgatgccttagctttttcatagccatagtttgtaatccagacttttgttgtaacaaacaactcttctcgaggtacattagtttttaagattgcttctcctacagcttcttcattaccataagactgtgctgtatcaattaaacgatacccagtttcaattgcctccaggacaacccttacacattcttctttatccttgatttggaaaactccaaatcctgccatgggcatttttacaccattatttaaagttatatattccattatttttccccctattctagccatatatttttagtctcaataatcttgttttaataatttgatttttaaattcaagattcaatcataatcttttacatttaaatatatttagtttatatactaaaaatctttatctgattaacagtgcactataaattatgcacttgtatcgataagaataaaaagttaaatatggttttttaaataattaaaatttccatctcaccttatttatctttaaacatagtataaatcttagagttaactataagtcaataaaaacttaatgttattaatttaaaatatcactaaataaaaaaagaggtctctttcaaacctcctatccaatcataaaactatttttaataaacaaatctataacccaactataaaatatattactcgactgcacatatacatttatttttattagtatttttagctttatataaggcttgatccgcctgctctaaaactgcttgccaactttcttctccatttaaaacacctattgccccaccaatacttacagttaaatattcacgacttgaagtatttggcattaataaatgcagacgttcaacagtatgacaaagttctgtaccaattctttgcatttcttctaaatctgtattttttaataaataaacaaattcttctccaccataacgaatcaaaaacccttcactcaaacataaatttaaagcattagaaactctctttagacattcatcacctttaatgtgcccaaaagtatcattataagatttaaaatcatcgatatcaattataaaaacacctgttttaagctgactatcgcgactctctaaataaatattatttaaacaattagctaaataacgtcgattttgaagccccgttaaagaatcatgatgggcaataaaatctaattccgcacttttttcttcaatcatcctatttttttctagaataatactctgatttaaaaaagtttgtcgcattgattgataatgataatatccaacaaatagagccataatcgttaaccaggtactattaacataaatactataatgactccccaatggttcaccatgtttcactaattcaattccagtaatcaaaataatatcagagaacaaatacagaggaacaaataattttggcggtaaataaacaagaatagcaatactcaacattgtaataatatgcacactaatgttattagaaacacgattatcatatatcgttactgctagcgaccacatgattaaaaaaacaatatagtaattttgaactttcaacaataaaccctttttaacattctttttatgcaataaaatcaaccctaagacacagatgataaacatgagtgtgtataaaagcatataaatcttacttgacttggtataataggtaaaatccgtatatacacttacatagaccatattatagatttgaaataacataataaaaaatatcgggatcctaaaatacttcttaatatcatcttcgagaacatcaataaattcaagttcttgctgtttagttagctttatcttttcagttaatgacaacaacttcataatttgtcctttctaaatatctatttataattcttattgacgatgtaagaacaaaattggaaatggattcccttgttcatctaattcacttcgccgataaatagtaaaccccatatattcataaaaagctagagcttgaggattttgctcatttacacagacttcagtgatctcataatcatttattcctatctctaataaattcctaccaataccttgtcctcgacgttgtgctgtaataaataacatctctaatttatcctcagcaatccccataaaagccaatgtttctttattatcaacagcaactactaaaattggaatttcttcaattgcttgaaaaacatacttttttatttctcgaatattagtttcactaaaaaaatcatgagttgctctaatcgaactttcccaaaccgtaacaagtgaactaattaactgttcgtctcgttcaaatactctttttatttccattagctcctcctttattactcaaagaaatcctttaaataaatatactgcattataaattttttaaacacccatagcaactacacgtttaatatattttttcataattttttcaattccaacatttgttaaaatgatttatcattatttctttcaatatataaatagttattatttactttattttactataatcacgtaaaaaagatagttatttaattaataactatcttttttcattaagttatcatttgtattttttgatttacctcttattaatataagtgcaataatatttgcagtcaacatcgtaattacatatattgtaagaattgtaaacattgacggtactacatccaataatgctgaccaatcttcatgctttacccaattacttactaattgataccctgctaaaagagtaagcacggtaaaaacaagtcctaaaatcgaaaaccaataagccctcagcttctcttgacttttaaatatagacagacagctcatcaaagtacagataatactcaagcttccaaagataatccacatactacattattctcctagatataaaatttaagattattttaaataagctcttgatcaataaactctatataatttttcttaacaacttcatctggatgatcaaggtaccactgatatgattcctctaatccttcgaaaagacttttttgacttggcaacagctgattttgcttagttacatcaagaacataattatagttatgaaaactaaaataatcacgttgattatcatgcttagttacatatactttatttagcggtactcctacaacttgataacataactcaacaaatttatttatatcaacaatttcgctatttccaacattcatgatatgatcatgagggtgctttttaataatggtttccattaacttgcatagatcttcaacatgaaaaaactgtaataacattttaccatcattaggtagatagaaagaacgtttctttaatgcacattcaaacacaaaaggttcgcgataaacattttgcattggtccatataaatatggtggccttaaaatatatgcttgaggaatatgacttagtaaatagttttcagcttcaattttattacttccataatctccccagatagaatttcttccaaccttctgctcctctttgaacggttgtgataaactttccggataaacagcactggaactaatcaaaatataatctttgaccccatttagaccttctaacaaatctttgacatcttgtttagtataagcagcaacatcaaaaaccacatcaaaatcatatccctttaacaaatttcctaaatgatgtcgatcacctttaattaattttactccttcaatctgttttcgatttccacgattcaaaacataaacatcataatcatgatttttaaaataagttgcaacaaatttacttacaaaaactgttcctccagttaccaaaatcttttttgtcatattctctccttactttataatgatttagcacatgcaattaaataatgacgagcattagcagatgtcacttgtttagcccgcatcaataaggcttgttttttcagttctataatttgtaatgaattatcttgcaccatcaataactcaattaattgcaatgccatttgataatcttcttgtgccatataatttttaatagctaatattagtttatcattatcaccaattaaagcaagtaccgcctgattataagcctcagttggatgtggcaataacttcacaggatccccatcaaaccatcctacataaccattataaatacttttcactgaccattctacagtaccataatactcacctaaatattctttatcctgatatattggtgctaatttaacatttttaacagtttcttccaaagacattccctgattcatacaatctaatgttttaaataaaatatcctcgatggcatccctaaaagttcccactattgctttaatctcattttgccataaaactcgtgtatgtcctggtaataatgcaacagctggataatttaaaatctcatttaaagtatcaatccatgttgcaacatcgcgatacatggttcctcttattgcataaagattaggccagcatccataataattatctccacaacacattatctgatcatcttctaaccaaacatagatttcatcatctgcttcacctacagcactaaccatctttaatttaattccgtcaattactcgttcaaccactttttgctcataatatgtcgtcggttttataaaatcatattttccttctttaatttcttttccttcacggattccaattccttgactaatcgcttcctgatctgttaatccataaccatgctgataaatccctcgttgatttagtagtttactaattctatcgtagtattttaaaattggttttcgaggtttaaatgctattacttctacaactgtatcccgaaaagcacctgctcctcctaaatgatcaggatgtccatgagtataaataattgttttaaccggtttatcactaattttcgctagttcatctttcatcacttttgcacgataatcagaatcaagagtatcaattaatataattgaagtttccccaataatcgcaattgcattactatgtccatagccaaaaaaatgatatacccgttcattaactttagtaattttcttttgatagtttgttttcgtaaaattaattaacttttcttcacctaacattgcttattcctccttatatatcattatattgattatctagtcttttaatagtaggcacctttaggtaactgtcaaaaccgtagtcatttggactacggttttatttaatcatctaaaataaatgactttacttgattcttttttagtttattattagtcttaactatctcttcttttaaatcaacaaaatctttaagatcatgatttaaagaaattaaaacctctttattattagtattaaaagttcgataaattaatttatttgaagattctgccttttttaaaacacttagtgtagtaagttcattattttcatgaagcagagagaaagtatatggagtgttaaaatcaacctcatttaacttcatcgcattgtacggcattttattataactaattaatggcgttaaataatctttagctaaacgtgataatttagcgtgatcattttcaataacaagcgcaaatctaaactctaatggttttaataattgtgaatctggtgtaggcatcttaattcctgatggtcgtcccggacgccgaactaattcttctttacctaaatagccaactgatcgaaataacgtaattgccagggtattataattatccccaattacttcatattctctaactgaattagtgagtaaagctaatggacaacccttgattgcaacgtaactaagcattggataaatactatctggccgctcgctccaattatcttcttgccatgattctatcgccatatcttttactgggcgttcaattatcccaaactgattatcactaactgaggcctgagcccaaatatcagttggaagaagtactctaagtcgatgatctttagctgtattatcaatattagttgtaatgtcaagatttcgttccccttgttttaattctatttgaaattcaatttttaaacttgtatcacatttcttttgtttacgacttgttaaatcttttggtactttcatttcgacaattatatgagctgtagtagaatacctggatctattgatttgataatctgccttagcatctttagaagttatgatataatcttccaataatggtgaataatcataaccatcaccctcatcactaccatcttcaatcaataaaacggaatcataagtatgatcattaactaaatcatatatttttaaagttccattactattaattttaatctgatagtattcattttccagaaagtccactttatctaataaaatttcttttggctctactgcttcttgaattaaataagcctgataccccatcgcaggaaaattatctttaaattcaattgtatattttataaatggatcataattcccataatgaacaatctgacgatcaattaacccagcatcaatgatttctttattaataacttgataatctatttcatgaccctcactagtaacaattttaaaacttttcattctcgtgataacttcactgcgaaccactcgatttcttggataagggagtaaattaaagaccgttagtttatcaagcgcaatatctttaggcattgcatcagtaatctttcgtttataaaagtcaatcattcgctctactttctcattagcaatcgtaaaacggctgcttatttcttgatgtactttatcactacaacaacatccaattgaatcatgggcatgatttttcattatctctttccatatcgattccatcatcccatcaaaatactcaaaccctaatttaaaagcaatggaagccaatggctctagcagattggtaattttattttcaattacggtattcattgttttgatatctgcccgtgatgaaaaaatcgaacgatgtacacgcatatatttaccatccagcagttcaccatgaaggatatcatagttatcttttttctctaattctttaaatatctgatcatagttacttaaaaagaagtttttatctggataaagtctttttaactgctcaatgacatcaaatatatttttttgtaatggcatttggtcgtgaccattaggaattaatatatgttcactagttgctcctttttgtaacactggcatatatttatcacaacgtttttttaattcatcaagatctgtgggtaaatattttccaattgcataaccaagtggtaatagttgagttaagacttttgaaccatcgtcactagtccaataaaactctgtcttatttgaacccattcgctcactcgttccccgccagaatatgcttcttgtaattccaaaaccgtttaaaatcattggcatttggcctgactgaccaaatgaatctggtaaataaccaatattcataggttctccaaaagtctgactatctttatgaccgtataataaattacgaacaatcgactctccacctacaaccatctcatcagtttgagtgtaccaaggcccaataattaatttaccttttttcactaaattaactagtcgtgataaattttttggttttaatgctagataatcctcaagtacagctgtttgtccatcgagaacataataaggataatcctcattattttctaacatttctaatatttcttccatattgtttagtaataataactttgattcttcggctgaaaaataccactcacgatcccaatgcatatgggggacaatgtgtacttgatttgccatgctattcctcctattttgccttagctaatttctgttttcgagtaattacaagtagcaccgctgaaataatcgctccaattactgccgctccaaaccagacgatcatcgctaatggaatattatcagcagttaatacgaaaatagagaatattcctgccccaggtacatcaagaccaatattaaacatcgctacaatcgctccacaaactgcagaaccagtacatagggatataattacacgaattggatctgccatcataaacggaattgccccttctgtgattcctgctaaacctaatagccaggttgaatttcctacttcacgttcttctggtgtaaataaatcttttctaaactttgtcgcaaatgtcaccccaaatgcactaaccattttaattgaagcaaaagcacaatatggcattaaaactccttccgccattgcagcaacacagaaagcatatgcagctttatttactggtccacctaaatcaaaagaaaccatgattcctaaaacagcccctagtaaagcagcatttgttcctgccattgatcctaaaaagtcaactaatgctgtattgatcattgcaactggtttacctaatacgactaacaataagactccaacaatcaaacaagacaatacaggataaattacaaaactcacaaaaccggcaaatgttcctttagctggaatccatttctttaaatagcgtattgaatacccagcaatgatcccaccaagcatcccgagtaagaatccaccgccaacggtattagcacaaaatccagccgcaaaccctgaagctaaagctggtttatccccgattgaataagccatataagctgataataccggtaccatcaaggttcctaacaatccacttcccattgatttgatcaaataaagccaacttccttcggtattcatcaaatctgtaaaaccaaaggttcttgcaaagattacacaaattgctgcaatcattccgccagccacgatcaatggaataacatgactaattcctgtcataaccgcttctttaactgtttctaaaaatccggcttcttgatgtcgtgaatgttctacatactcaccacgagcagtttgttctgctttaactaacgctgtttcgataatctttttagcatcctttaatggtgcagatacttttgttttaatcgttggtaaatgactaaaacgttcctcctctttaaccgctacatcgacagcaaaaatagctgcacttgcattttttaacatctcattagtatgacgatcttcaattccattagccccctgcttttctacatatacatttactcccaactcttgcccagcttttgttaatgcttctgctgccatgtaagtatgggcaataccagcggcacacgcagtaaccgcaacgattgagcgatcaaaggattttatttcatcactattaaccccattatccagattttgataaaattcttttactgttttagaagcatataatttttctgtatatgtatgattagccatcttcgtcatcatttctgccaataattgcatttgaaccgaattcctatcattttggggaattgcaagtaaaaaaacatattgtactttgttaccttcaacaacactttcccaatccttcacaggtttctttaaagttacaaccgcaaaagctgcttctctaactactccatcttttccatgaggaatggccaaaccattatcaatccctgttggtgttaagctttcacgttctaatactgcttgataaaaatcttcctcattactaatttttcctgcctgatataatttagaaactaagaatttaattatttcatcttttgatgacaaatcactatttaaagtaataagctgctcacttgttaatttagataattccatttcttctgccctcttcttttaattttattaatcaccgacatgtctttccctgattacaaaaatatcatagcatattattttgtaacccttttcaatttggaaaatcatacacttatttttaaataaaaaatggatgtaccgtgtatttatacacagtacatcctccaaaatacctctgtcaactctcgaagcagcatcatcatccctgttcgatccgcaacattatagccattcaatttttgttcatcaccccaataatataatggaatatgtgctaaaccagccaatcgattttcattaaaatgggtaaccgaaataacaaaaattccattctgttttgcttcttctacccaattattcaaacgaccattctcaccacttgcactaattacaaacaaaatatctttttcttcacaatgcttgattcgatattcaatttcacgataagtttggtaatattcagctcgataatcataacatcgcaaattatcgaccatcatttcacaaaaatataatgactcaccgacaccaataaagtgacatgttcgggcattcttgatcttagcggcaacttcttctaacgttttataattaattagttccattgatttatacaaattctttgataataatttttgaatatctaaattttctgatacttcgttattaactaaaaatttcatctctgcaaagcctttataccctaactttttacaaagacgcatgattgagttgggaacaagataaagatcttcggctaccttttgaattgataaatgttccaaatttgctttatttttacgaatataatcaacaattagatcatctgtatcgtttagtgtaaactcttgttgtaagacccgttcttcaaatttcattatattatcctccatgacaagataaatatcaactctctcaatataacttatattctaacattattttttgatttcggtgcataatctttcaattctggaattgctcccgcagcaactgcccataaatacaaactggcaattgttgcatatggtccatagcgacgtttatatttagtgaatagttgaggtgtaattcgccgatgatgatagaccatgcgcattccccgtaaaattgctaaatcgctataactaattatatctttacgttgtaatgaaaatgttaaaatcatctctgctgtccatctcccgattccaggcaactcacaaagctgttctataacctcttcatttgatagatcagctaatcgctccaaatccaattgatcactaatgatccgtctcgttatttctttgatataatgtgcttttttcatcgtaatgccacatttttgtaattcctcagctgaaagtgatttaaaatttgctggggtaatcggactaaaagaattgttgattctctgccaaattgtttgatgggctttagtagaaatttgttgaccaacaatcgaattaactaaagctgcaaataaatcaggtattaccgcacgtttaattataccaatctgctcgattacttgttttaaaacaggatccctacttttcaaatattcaatttcaatatcgctatattcaaaatattccattatatactccaacctataatcttatcgcatagttacaataccatcattttaaaacaatcaaataacttttttgactatattgattagctttattaatttcaagtatacttgaagtactaaactttgtaaataaatgaaatattatataaatcaagcatgtttccttatgtaatcaaatagtttatattactgcttttatccttatgattataaattgttagttcataattatctaataaagcacaacgataaaaatactctagtaagtttttactagagtatttcatttatactttaaataactcaataatgtcattagtagacattgttgttatactaccttcattattttccacaaaactatcagctaagtttttctttttattttgcagttctaagatcttttcttcaacactatccttcattaccaatttataaaccgttacaacattttcttgcccgattcgataagcacgatcagtcgcctgattttgtgctgacatattccaccaaggatcaaaatgaataactgcttcagcagcagtcaaattcaatcctgttcccccagcttttaatgaaatcaaaaatactgttgtatcatcattttgaaattgattaactaatcgatgacgttcttctttttttgtatcacctgttaattgataataagtaatactttctttctccaattctttagcaattaaatcaagcacggaagtaaaagaagaaaataatagcactttttgattatttcccaggaaatttcggattaaatcaagacatcccgataattttgatgaaatattcgaaatattatcatatattatccgtggttcacaacaaatttgtcttaatcttgtcaacattgctaaaatagcaatacgatctacattatcataattaagctgttcttgcagttctttattgacctgaattaaattagctaaatacaacttattttcttcttcattaaattcaattgataatgttttttcaatcttctctggtaattcagtcaatacatcttttttattacgtcttaagataaatggtgtaattaatttttttagttcctgctgtttgttttcatcatgatttttaacaatcggtgtttcataattagttttgaaataatggtagctatacaaatactctggcattaaaaaatcaaaaattgaccataactccgccaaagaattttctataggagttccggttaaagcaaaacgatgtttagcttttaacgattttactgttatcgcattcttagttttaggatttttaatatattgcgcttcatccaaaataatattttcaaattgataaccatcataaagattagcatcacgacgcatataatcataagtagtaattagcacatcaacctcattaaattttctaattgcttcttttcgtcgttttagactgccgtgaatacaagtacaagataaagaattagaaaatttatgtatctcatcttgccaattcaatagcaatgatgatggacaaacaactaaactagtttttttatcatcccgattttgatccagtaaaacaatcatttgtaaggttttaccaagccccatatcatcggccaaaattcctccaaagccataagaactaattgattgaagccattgatatccaaatttctgataatcgcgtaaaatttcttgataattaggcgctaagggataactctgtttagctatatctttaaaattatcaataatttctttaaatacggtactacgatcatatactaaataattgcttgtttcggctttattatcaagactaaaagcccgatagacatccatttctaaatgtccatcctcaagcatctttggtctaatttgataatcagtcataaattcatttaattcttccagctcatcagaatcaagatataatagttgaccattttttaaccgatgaaatttcttcttcttttgatatgagtttaagactaacgctaattcatctttaggaatatcaatactttcaatgtcaattgccaataagtcattttctaaagtcactcctacattaatactaaattgacttttcttcccaatctttttaagtgcatcactaaccatcacttcacaataattagctaaaaaaggcaaaccttcatttaaaaaggagtaagttttttcactttctaaattcaaatacatacaatgtttttcaaaatcaactacatcaccaatctcttttaaataatcttcaattaaatcaaaattaattgatgtttgctttctcggctgttgaaatgaataaatcatttctaggccttgtttactttcaagataaactttgatttgttccaattcattaatatcgccatagagtgtcaatatttctgtttcgataacttcacttgttaataagtccccagtataattaaaatattgcttaatatcatttaaaatatatttaacaaagtcatttacatcttcttttgctaataataatttgtctttactttcgcaattatgaataaatttgattgcttttccttcatcatccagcttaaccatacctatttcattttcagtaatcttataaagatttttataaccacaaaattcatcaaaatcctttaattcaagcgaataatatttttcaagtttccttatatgtaaagtaggctgataattgtattgataaattgataaatgttgattagttttttctaaatcttttaatacttcatagatatattcaatactttcgggaataatctttatctcatttgtcacatgcgatatatcgtaataatattcctgttgataccgctcataagtgatcatacaaaatttcattaattcaataatcttcagtgcttcatcactaaatactttttgattatgaacaaacgctaattgtttaccatattcaacatattcattatttgctaatgcacttaaaaaattaggaatattttttattatatactttttatcacttcctactttgaattttaaacatgggtgcccataattaatcttgatctggacttcaagatcatacttttgatttagtttaacctgattaaaatcaattgctttagcagtcttaaatgatgctattaggttttttgttactgctaattcattttttagcagttcttcttcctgctgctgacgaatttgtactaacttgtcgaaataacttatcttaccatttttacttttatatttaaatggaaaatcatcaggtgataactcttgaacctttagcaaaacagccccaatatgaccgcaagccgagagttcatcacaccaataacaattacaactatagtcagtaatcttattatcttgatcaataacgattttacacacattttcataactaccattatcaacaatgccttcaattgtataatcatcaaaaagtcgatcataagtaattgtgatttctctaacataatctttttgataatatattcgtcctgttcttagatttctaacactgcttacgattctatgtaattctttgtcagttacaagcacttaccagtcacctcctaattttctttaaaattatagcatatatcgaataatattcattaatattacgactctaaccattatgactaaactaaatacatagagttataaagatgtaatcttgcagcaagtatttatttcaataaatttcttattactgccataatcaaatttttaaataattaaatactcatttccacaagcattaataaacaataacaaatcatcataggtaattgatattgttgctgtattaatattagggtgaattaataatcgttgtgctcttaattcacgatcaatcaatatttttactcgcttattatcattaattattcctaatggtgtcactgatcctggaattaactttaacaattctacaagttcttcatcactagcaaagcttagccgcttactaccaatttgtttagctatatatttcaagtcagcacgcttttcaaccgtcatcatataaatgaagaattgtttatcactactttttaaaaatagatttttacatgctactccatcaatttgctcattaataaacattgcttcttcaacagtgctaactgattggtgattaattttttgataatcaatacctaactgtgttaaaaatttatatatatccattgttaactcctctttttatgataatgattttaacatattaaaagtttaattgaaaataataaaagcatccaaaggatgcttaatcaattttctttaattcataatcaaaaccatattttaaaatatattcttctagagtccaattattatcataaattattttagctgctttcttaccaacataacgtaaatgccatggctcattagcagttccagtaatatccgaacgatttttaggataacgaagaataaagccatatttataagcatttttagcaacccatttatactcatccgtatcaccaaaaaccattctctttttatcaattacactttggctagttaaatctactcctaaccctaattgatgttcacttgagccaggtttcgcaactaaaccactagcagtgacttcatcataacggttaaaataatcattataaatttctacttgttcatcatatgagcgatatccactatttaaaactaaatgataatcttcttttaaagcatctttattcatatcttctaatgctttagctgcatcttttcgaagtttattatggttattatcaggagcaattggtatatcaggtacaacaagatcagcagggacataatctttaggtaacacaaaaccctttttaatcaacagaagtgtattactaggatctaaaacttcatattctgatccaacagcattattagcatcaataaatgggtaagtaaccgtaagtacagctgttattggctcttgattacttgcaagatacttaggcagatcctcaaagaccattccattaatctttaaataagatttaatttgcgaatatgtatatttattatcgacgattaccttaaaatcagacagctctgcaactttcattaaagataatacttgtttataactatattttaaatccttgagatcttgataataatcctgatagaaagtatcaatatattttattacttctttttttgaataatcttgatgttctttttgatatgtctgatactctaaataatgttttttatttttatattcattccaggaacttagatcactgaccttttccgcatccaaataacgctcaatctcattatcatttagctgtaaaataatgctttgttcagaccaaccatagcccttcgtcattaaccgaattcttgtaaaattaaatgcaatcaatgtcccaagtattaacatagcgattaatacactaatgattactttataagggatttttttcttttcattgtacgacatgtaactgcttcttttcaacctattatcctcctcgatatattcttggcagtcgacttcctaaacgactcaaaatctcattactaattgtattagcttcaagtgcaatttcttctaccctaatttcttctgtaccatcttgaccaattacggtgactagatcattatcactgatatcactaatctcgctaacatctacaagcatttgatccatacaaattcttccaactattggacacttttgacctttgatcaaaacacttccatttgaagaaagtatacgtggcaatccatcaccatagccaattggaataacggcaattacactatcacgattaaccttataagtcaagccataaccaagactcgcgcctttagtcaaataatgcagcattgcaatttgtgctttaattgttaaagctggttttaaatctaattgtacttttgaataatcattgaacgttgagtacactccatacattaaaatcccaacccgagcataatcggcattgatttcaggataatttactaatccataactactttgaagatgaacctttcctatatcataatgtcttaattttaattcattaattaaatcataaaaagcagctatttgtttttgggtgtattcttgatcaactttccttttactatcacaaacacaaagatgtgtaaaataaccctgaatatgaataaactggtaatcatatatttctttaatactctcataatcgcttaaatcaaaacctaaacgatgcattccagtatcaatcttaatatgaacattgatcatatgcccactttcatttaattgccgagcatgctcacgatttacaatggtttgaatcaaacgataattatgtaattcaattgcacgaatgggatgactataaccaagtactaaaatttcgccatatatcccatgttctcgaagtttgataccttcatcgatagtagcaactgcaaaagcttcaattcccattttttgacaatgtttcgcaacttctactaacccatgaccatatccttctgctttaacaactaccattaatgaactatttttatttaataatgaactcaattcatcaagattatgcgtgattgcatctagatcaacttcgatccaactgcgacttgtgcgaatattcaccatacttctcttttcctttcaataaaatctctgaaaataaaacagttattatcaatacactaataaactgaatcagcgggtcaacaactaaatgatcacacttcaataatttacctattccacgaacaacaacaatcatcaagggatgaaaaagataaatagctaacgatagatctttacatttagatattcgtttgcctgatattcgtaaaagtccctgatatagccaaaacattactaccggcaataagatattcattgaatcatgacgtacaaaaacataatctgctgcatcttgataacctttcaatagtgatatttctataaacatcaaacttattgctaatatcgtgctaataacgattactcttaaactaaagttaaattgctttaccgcaagaagttttccaatccaaatgaataacggtgcaaagaaaataccatttcgtgtataatcacttattaaaaaaatcaagtcatacccccatttacaatatgggtgtatcaaaccataatacgaatcaccacctaatccaattaaataaagtagtaccacaattgaaaaactcgttaataaagatacccgtttatctaatactgcaacagtgatcaatcctagaactgttgctggtaaataccacaaatgatagaaagttccatcgaacaaaacatctttaattatttcataaatcagattactttgattaaaataatgattataaagatttaatggtaaataaataattattgctgctaaataaatcaatagtgtctgtttaacaatcttacatagtcgttttttactgggattaagaaaatagaaataagcagttgtgataaaaaagaatggtactgcaatacgtcctaatccacgagttaaataaaaatctaaagttgggctaattgtatctaatggtgaagtatgaatcgtgacaactaaaattgcagcaattatcctaaaacagtcgattaagggataaccttttactttagacatatggcctccatgatgtaataataaaaccatcacaattatttcccgatatttgataactaccatgatcacttaagtttaacttagtctgttcattaactgctggaacataaaatacttcaactaactttccttggcagtctaaaacatatggattgaaaatagaatgattttttatatataaatgatattcttcaaaacaccactgattttcttccataatttttgcatgaacaatcccaacatagcgaaaatgccatggttcctcactaattttggtaaaatcaattttatttttagaatatctctgaataaagccataatcacttgcaatatcacgaaattgttgacagatttcctgacttgtaaaatcaggacaaaagatatcaattgtttcattttttactgctaaatcaatggctagacctgtttgatgctcactacagttcactctagcaacaaacttatcaacaaactcttttccatgattttgaatagcctgattatagatcatagcttgttcttgaccgcttcttaaaccactgactaaaacaatcttatcttctgctttaatttcctgtaatgcttttgttagcatctccatagccgttttttctaatgatattgttgaatccttggcagtcgaacagttagtaatttgatagttatttgcaattggataattatgattaaccaatactaatggaccttggtaaatatcatctttatttaaagttaccatctgcatacttaagccctatcgcaacaattttatctattaattcactaaattcaaaacctactcctttcatcatctggggaaaacggctatgatcagtaaaaccaggaatcgtattaacctcattaaaaactatttcattgtttggcgttaaaaacatgtctaccctagcaaaattctgacaagctaatgtctgataaataatttttgcagtttcttgaattttccttgccgttacttcatcaattctagcgggcatatgaattgttgaagttttcaaagtatacttttcatcataatcaaaaaaacctcccgataattctatttcatctacctcaccaacagtcaattcatcgttgccaataatcgcacaacctacctcaaacccttcaacagcttcctctacaattacttcattatcgtaattaaaggcatattcaagtgcttttgttaattcttccactttgacaactttactaattccatatgatgatccagcttttaatggtttaacaaataatggaaaattcaatgctttaacattaaaatcatttatattatgtacaagcacagacctagtaacctttatccctgctgctttgactaactggtgagctcgatacttatccatacataatgctgatgctaataatccgcagccaagtactggtatttttgcaagctccattaatccttgaacagtaccatcctcaccattttttccatgcaagaccggtaaaaccgcatcaatttgctgatagattattttattatcaactatttccatcactgcttgtctttctggttctaaacataccgtcactggattaagcagttcttgattccaagtatcattactaattttttcaatttccccatcataatgaaaccactgtcctgctctcgtaatcccgattaaataaagatcatatttttcttgcggaaaattctttataatcgcagctgctgattgtagcgacacttcatattcacttgattttcctccaaataaaatagctattgtttttcttttcatattatatccttccttactactccttcgataaatctataatataaaaaaaacgctcttcattttttaatttcttcataagaaaaaatcacaaaattcccacttatttcttacatttttcttacaaaaaaatcagcattctgctgactttactgttaaatattaaaatgctttttaaaactttgagcaatcccatcattatcaacactatcagttatttcacttgctacactttttaatttaggaatagcattccccatagcaataccatgtttaaccaattgtaacatctctacatcgttgataccgtcaccaaaagcatacgtgttttcataatcaattcctaatttttgatataaatattcacaagcagttcccttagtgaaccctttgcaataaacatccattcgaatcaaacctgtatcatacggaatcatcgtaaattcatcttctaattcatgataagctgcccacaactgtgctgcactatcaaataaaacacaacagcttaccgctttaacatcactagttttaaatacctcattaacatcagttggtctttcagttgttccctgaaacatagcacgatgttttataaccaattcatcatcaagaaaactgcaccatgcaccaccgcgaccattaaacattgaacgaccattatattttgcatatacatctaattgcttctgcaccattccattatcaaattgttcatcaatcaaaatctcattattaaaacgaatataatgtccatcattacaaatatacccatcaaattcaatgtttgccacactttcaggtacttcaccccgagctgttgcaatgacgatcttattaccttgatttttaaattcatttaaaacccttattgtctcatcagttggatgtaacatcccattaggtacattaactaatgtcccatcaatatcaaaaaacgctattttcgtattcataatgctcctccttcttttaagtataaagaaattcatatcttttatgagatattttaatattatgaaaataattactgaatcacataatcttttgcatgatcactgtaataaagagcattgtttgtatcaataaacacggcttctatccccgctaattgatttactaatgctaacccctgctctttacctaaagtaaaacatactgtgcttaatgcatcaccatcaactgaatgattactaataatcgtaactgaagctaacccattatcataactatatcccgtcttcggatttaagatatgatgataatacttcccttcaacttcaaaataacgttgataaattcctgaagttacaaccgactgatcattaatttttaattttaaaatgtcactacttcctttaggatcagtaataccaattgtaaaatcatcactattctttttccctacacaaagaacattaccacctaaattgataattgcactgtctactccctgctcaattaagtattccttaattttatcagcaatatatccctttgcaacagcccctagatctattatagtattaggattactaaaactaattgtactatcatttaaagtaattcccctatatccaatcgacgtcaaagcaccggctattgctgaagtttccggcaattttggagtatcagctttaaaatcccacaaatcaatcaattgtcctactgtaatatcaaaagtaccattagataatttactatattccaaaccaatatttataactttagcaagttccttggatattttaattggtttagttttatcttgatgattgagctgatataattcacttttgggattagtccgggaaaagagaagctcgtagtccttgcaaatagcaaaacattcatctagaatattagacgaagcacaatcatataaagtaatcgtaacttgcgtatctaaaagaagctgcgtttgacttagaggctgtttattcgtacatccacaaaatataattaagattattaaaatttttataaaccaacgttttttcatgtcatttcctttcattctggaggtagctatgtttaagaagaaagacttcattattattttcataatttttgtcgttattatcggggcactgctttttaatcatttttatttcagtcaaaaagctgcttacgtgaaaatcaccgttaataatcaagtatatcgtactgttcctctagagattgatcagacaattaagattagtgataaaaatatgatcgtgatcaatcacggaagtgtacatatgaaagatgctacttgccctgataaattatgtatcaaacaaggaacgatatctaaaaatggtgaacaaattatttgtttgcctaatcaagttgttattgcaattgtttctaatcaatataacgatgttgattcatcatccaaataggaggccccaatgactaaaagaattacctatttatctttactaatcgcaatcgcaattattctcggttatcttgaaacctttattcctattaactttggaattcctggtgcaaaactcggccttgctaacctcatcggattaattgcactatatcgctttggatttagagacgctttaatcatcactctcctgcgagtttttattattgccagtgtttttactaactactatatgtttttatatagtttaagcggtgctttattaagtttagtcattatggttcttttaaaaaaaaccaaactcttttcaactttgatcattagtatttccggcgcaatctttcataatctaggacaaatcctagtagccttaattttctatggttttaatattatttattatctaccttatttaataatcttatcacttattacaggtagtgtcattggtatcttaggccaaattattttagccaaactacctaaacaactatcataatgaattgttttttactaaaaaaaagaatttcttccttttcaaacaacaatataactctcatttttagcagcaaatgaaatgatcatgtaatattttatattgggagagaaaaataatctacatgatcacttactttactacgatagtactatactccttaaacattactttaagtcaatctttttttattaaactaattgccgattcatccattttccactaaaatagcgccagataaagaaaatacaacgaactccccaatcaataaacattgcaatccaaacaccaattaatccaagattcatatattgtcccaaaacataactaaagcataatctaaatattagcattgatgcagctgaaactatcatcgtaaacttagcatcatttgctgctcttaaagcatttggaaatgtgaatgacgtaggccagattaatgctgcaataattgcatgtaaaaagatacattggtatgcaaggtccgtcgtttcttttgataatgaatagaatgttaaaattgaaggtgttgcaataattaaaactacaattaatccagccattgaaagataagtaatttttaataactttttaacataatattttgcttgtttataatcatttgcacctacacattgacctacaaccgtcaccatcgccaaagacattgccatcccaggaataatctgcatttgagccaagttattcgaaacagcattagctgcaattgaatatgtcccaaaagttgcaattaaactttgtactaagattttccctagctgaaacatcccattttctaatcccgaaggtatcccaattgctaaaatcttttttatatacataaagtcaaatttccaatgaagataatcatttacacatacatcattatcccgatgacttaacatctttaaaattacgatacaagctactgctctggcaatcagcgttgctaatacggcaccaaataccccccatctaaaaacgaaaataaaaattgcatttaaaataatattaataacattcatgactgcactattaatcatcgatattttagagttaccaattgccctaaataatgctgctccagagttatataatgcaataaaaggatacgacattgctgaaaataaaaaatagatttctgcatttttcattacatctacttcaacatttccaaaaaccatgtgtaataatggcacattaaatgcaataactatcaccatgataattactgacaataatgctgtaatcaaaatcaactgttttgctgaatactttgccttatctttagaaccctgtccaataaactgggctgcaactactgctccccctgttcctaatgcagcaaaaatattgattaataaaatattaattgcatcaaccagcgaaactgctgatactgctgcttcgccgacgctagcaaccataacagtatctgcaaaacctactgtaattactaataattgttccacaaccaagggaataattaatttttttaatgctttgttatcaaataacattcctcacgccccctacagttacctattatacgcccatattcttttgaacaaagtaaatttcattttctggaaaagcaaaaaaacctcacaaatgaggtctaaaaacaaattattagtctaacaatgcttaaacaaagttatcaattctgttgaggtcaagtctcgatattcccctaaagctaatttttgatcaagttctattcctgcaaaagcaattcgtttaagtgtacacacttcattttgacatgatttaaacatttttttaatttgatgatacctcccctcattgatagttactaaacaatggtattcatcaagtatttccaataaactaggtaaacattgaaccttgtgatcaatcactacaccatcaaagaattttttaatcaattcatctttaagcggaaatttagtagtcacataatattttttattaacatgattttgtggtaataataatttttttgatagtgaagtgtcattagtaattatcaatagccctgttgtatcaatatctaaacgccctaaacaatagcaatcttctcgcccaatcagatcaattacacactgatgatatttatcatgatttgcacaaagatagtcagccggtttattcatcatataataaacaaatggctgggcatttaattgaatatgatgatacataataatatcatccgcctttactggataacgaacatctgtaattacttgatcgttcaccctaatttccccatgcctaatcaaggttttacatatcttgtgattccctagtttattcttcattaaaacataatatagatctttaattcgactcacctccattttagaacttctttagcaaactttttagctgcctggatatcctttttatcaggatgtccaaagtttttaaaaataaaagcacttcctttacatgaaaacaccggtccataaattattcccttttctttaagctgtgctttaacattagtaaattgatctgttccaaaaccgttagcagaaaataaaataaccttcttaactttattagcatcaagttgtgctacaaacctagttacttgttcaggaatatttcctcctaaaattggacatcctaaaaataaaatatctgctttaacatcttgcacttgtttaatatttttagcatcgacttgaagttcgtcagcaattgccttcgcaattttcttattattctttttacttttatatattacttcaatcatccttctgcccccttttgacgatttttaaaaaatacttctaaatgatcgatcccatgcattaatttaattgataactgataatactgagtgatttcttcattactaaattcactaaataaagcttgatgtacctcatctgttaattcttccatatcttttctaaagcgcaatccctgtttactcattaccacacataacgaacgtgcatctttgggtgacttctctaaaatcacatatccctgcttttccaaactcagtgctaatttttttacattttgtcgtgaacaccccatcacttttgctaacatgcttaaatcaggagcatcagtaaatgaagtcatcgtagccattaataaccattgtttactcgtcatttcattgtaacgatcaaatatcgcatgtaacttattctcctgaataaacacacccgcaaataacagttttttgacccatttaggatcctgtcctaataattcataacttgattttttcatcattctctccatatccgtaactagttacttatttttattatagtaactagttaccaatctgtcaataaacaaatactttcatcagattatttcataataaaaagttataatgacttctcactataacctctaaaacagatattttaattttcgattgatcttattactttacagggatttccacaagcaacactattaggagcaatatctttagtcacaacactgcctgctccaattacacagccatcgccaatcgttacccctggtaaaataactacattaccacctaaccacacattattaccaattttaattggtagcgcttgttctaaaccagtatttctaattttatattcggtaggatgaatagcagtatatagaccacatgaaggtcctatataaacattatctcctaattcaattccaccaccatccataaaataacaattactattaataaaagcatttttaccaattttaatcttatttccataatcacacataaagggacttataagctctatgtttataggttgataacctaacaaacttgtaatcacttctaatcttttttcataactgctaggttttatgtgatctagatcaaaacacaaatctttagctaatactctttgttttaataattcttcatcattatttgcatcataccacattcctaattccattttttcacgttctgtcatttttatttcccctttattccttcttttaaccatttcatactaatctctgcactaggataccctgcaattaaaattgcctgtgcatgtacaccataatcacctgtttgtaccactgctttacaacgatcacgcatttcataatattcaggaatgtaatgcatcgaatgaatatttttctttcccaacaaatcaaccagtaactgataatctttttgatttacttcaatcatatcttctgtgacgattgctccttcaaaatcaccacaagcaactagtgtagttactatatcctcaaaacttggtgaaccggtcactacttctacatctatatattcaacacttgaatccagtgggtatagggctttactagatgttccactgccagcatcagcaataaataacatctcaccatgacgcagactagcaacaactgctgccaaacgttcatgaagaattctcttttttggtttcacacttatctccttatttattaaaagtcttttattaattaataattataagttatctaataaaaaagtcaacaaataaaacaactgtccttgaaccgtcctaatcaaataaatagatgaaacaatcaaattattagatttgaagttatcaaaaataataacttcatttattatttagaaataaacaggttaagctatgcaaatattattactatagtgttcagtctcatatttcataatctttttattttctggtattgaacatcaaactgataaatctgatgataatactgttcgtccaacaaacatataaatccatatttctctttcaattcaaggaaagatttatgattatttagatgttctttgacaatttctaatttatacgctttagcatacttttgtcccctcaacaatataaaagttcctattcagtgtttaattatttacactatctaggaggtttttatatcaataacagttgttttatttgtcttgtttaatgaaactttctctaataacttcctgtattcccaataaataatcattttcataattagcacaatacgttaattcaggcataaattcacttggtaaatactctaaacaaatcttcttgatttttaatatatcatcagcctcaatagcttcacctgttaaaatcacgattgaaggatttattatcgatgctacacaacataatgataaagccacatcttctggtgaataatcaaagcataactgttcttgttttaggtatttaaaaaatggtaaatataagatttcaccagcaatactattttctccttctattaatttaccattaataacactcccacagccaggtccagaatttaatggaaacgtcacataacaaagatcctttttattattatgtaaatagcagccataagcagtataattcatatcatttttaacaactgtctttaatcctgtagccttctcgatttcagctttaagatttacattttttaaattaggaatatctgattcaattactatctctttagaaattattgccggtacccctaaaccaattatttggattctcgaatcttgtgataaaagatatttaatgaattttaaaatatcctctaattttaaatcatttactaattctttaccctgttttagtacacttgcaagggcatcaatgatttgccagcaaagataatctctgcctctttttctttgtacaaataaacacaatgaatgaaaatattctggattcaatccatattttttagtaggacgacctttttttaaataaataatttctttttcaacaacagttccattatccaaaaaatcattaagaatcgttcctactgtagctactgtcaatcttgaataattagctagttctttttttgtcacttcttgatgtcttaataacaatttcaaaatgatttgatcatttaaatctcgtagttttccagttccaattctattcacatttatcagcccttttcaattatttttgattatatcagtatttttaaaagaaaaataccctttgtctccaaagggcttttaattcaagtacgtcattaacacattcattattatatgataaaaatgtcttttgggcaactgacaaaaagagaatatttaatttttttatttttatattgacttatagttaactctaagttctatactataaatgtagaaaagataaatacatgaaggaggacttaaaatgaaaacatggttaattacaggatgctctagcggaattggacgcggcattgctaaagcagtattaaagaaaggggataatgctgttgttactgctcgtgatacaagtaaaattgccgatctagttgatcaatatccaaatacagctttaggagtggctctagatattaccaaaaaagagagtattagtgctgcagtaaaacaagcacaagaaagatttggaacaattgatgtattgattaataatgctggatatggatatcgttcttcagttgaagaaggtgacatagatgatgttaatcttttatttaatactaacttctttgggccaatcgaactaattaaagaagtattaccacaaatgcgagctaacaaaaacggtgctattgtcaacgtatcatcaattgcagcggttagatcgggtgtaggttctggttattatgctgctagtaaggctgctttagaattaatgactgatggtctagctaaagaattaaaaccgctaggaatcaaggtcatgatagcacaaccaggttctttccgaactaatttttatgatacttcactaaaagggactaaaaataagatcgatgattataacgaaacagctgggaaaactcgtaaagagaatgtcgttaatcataaaaatcaacctggtgatcctgataaaggtggtcaagttattgttgatacaattgaaaaagacaactatcctttccgtcttctcttaggtagtgatgctaccaagatcgtagctagtgctttagaagaaagaattcaagaaatcgaaacttggaaaaatattagtagtcaatcagattttgaatagaagtaaagcctcctaataaccggaggctttactttgattcagttattaaaatgtccagtacaaaaatgttcaattatttctaaaacttctgttaatttatctgtttcaatataaacttgagtctctttaacaaatttattaataaaattatcatcaaaatttccatcagcttgtcttttgaaactttcttttaataaatgctgtgctgcatcttgatactcaggtttcactctttttaaataatattcataaaacttagtttgtccatctttcacattccattcactccttgcatctatcattaccacaattactttaataatacttagtaatctcatttttattcattgcttatacatataaaatcatttttcctaataaaatacactcctttaaactaacgattttcacaatttccaagatatatttttccatttcataaactaacttatctacctataatgtaagttaacacgaaaaagcaataatccccggctctaagacactaacaatcaaaatcttccagaaataagagaagactgccatgattaattatatctggcatacttatcccaatttttctaatatcttggtattttattaatataacatttaaaatatcatatatatcttctaaaatggttcaattcttagtaagttcttcatcaagaataataatattttgttcatcataaatacgatgcatcaaccaaacctgctcactgattctaatgactgagatacataatatcttaacacctttatgggttgccattttcaatgataagggttcaagtgatataactttttccctcaatatgatcaatcttatcttcaatcaatgtaagagcatgtctagcatcatatttagtaaaaatttgtggtgcttaaaacaattacatcatagtgatttcctactgcaaatagcttactataagatatcgtaaagaactagttgttaatccaccagtacaactgagcagtactctaattagtggccgtataaccagtttttatactctctactattttttcaaataccccaatcgtttgcttaagcgtcctcacttgaaaatgcaaataaaaaatgcgcaaacccaatatctagatttacacattactgttacttgattattcgaattataacaactcagtttattaaaagccaagaaaagattattttactaaaataaaaaagcctatacggcttaataaaaaaataaaaatagtcactgattaaaacaaatagtgtcaatagatattttagggagtagtgactatttatacaagttatctaccttgcactattataatctctcatgaatgttaatttaatatgaattaatcaacctttttataaattattttatttatttttgaaatttaaaaaagtgcatctttttaaagatacactttttattatcaaattattcagcagcttctgcagcttgtttgttttgatatctttcataagcaattaagaatggtgcataaattaagatagatgctacgattgcaattgcttgagatacagcacccatgatattagctcctgtagttaagaaaccatgtaagataggtggtgttgtccaaggtgtattgattacagcttttggacagaatccaattacagttaatacataaccaagcattaaagtaacgattggtgctaatacaaatggaatacctaagattgggtttaataccattgggataccaaatgtaactgtttcattgatgttgaataaacctggtactaatgagatacctgcgattgtacggttatcttcacgttttgagaaaactaagatagaaattactaaaccgattgtaaccccagaaccaccaaattcaccgaacatttgtaaccatgccattgcgaagatgtgtaaatcatcacctttagcattatttgttttagagaatgtttcgatattttctaacattaatggtgtaaataatgcttcttttactgcagctaacatgttgttaccatgaatacctactaaccagaataatccgataatgatataaataatgattacccctggaatagttgatccaattgcacctaaaggtccttggatataagttgaaattacgtcatttaaatataatccagtaactaattcacatccacgtccaattaacgcaatgattgctaaagtaattacagctggaattaaaacttcgaatgcacgagcaacacctggaggtactgtttcaggcatttttaattttaatccttctactttacgtaatgcacagaagatttctactgaaacaaccccaacgatcatccctgtaaataaacctgttgctcctaaagcaccaccagcaacacctgtaaatgtttgtaatgctccatcagctgttaattctaatgtttgtttagcagtgtctactaatgcatagttagcccatccactttgagttactgctagccagcaagcaagtcctaataaacctgcgaagtatccagtttcaccattagcttcaccgatttcttgagcgataccaaaagtaatcccaactgtgatacaagaaattgttgcgaattgcattgctgcaaacgctgggttaattacttctaaagccatgataggtttccagaacatacctaaccctgaatctgcattaactaatacgttacaccataaaaccccgatcgcacctgcgatagtcaaaggcatgaatgtttggaacgcatttttaattgcagataaatacttattttgcccacaccacgcaccaacgcggccaaggacatctgccattttgtccataattcttttcctcccttattgactacctaataatagcaaagggtgaaatacttggaaacgctttccccacattctgtaagagtcttacaatttttttaaaatatttaaaaatgatatgtaaatttattacatatcatgatctgtctttttttcatatttttgttcacaatttatctttctaattaagttaggataatagtctttttgaaataagattgaagagattagatccattaaataatcactacttaactttgaagaataggtttctattttcgaaacaatattttctttactacacattgttaagcaataattcgcccgttttcttaaataactatcatttattgaagtaattgcaataatagttcccttattatccacaatccgatcaactatcgtttttatttcatgactctcaccagaataagatatcacgattgcaactgtatttttatttacaaataaagaacgcttatcttgatcatttggtgaagatttaaaattaacaaagtgatcgatcgaaatcatccgatgctcgaataatagtcccgaaagatacgaagctccaacagcaaaaatatcaataactgatgtttttaataacttttcaattacttgattaagtacatcatagtcgagtaatgctttagtcgcatcaatcgtatctttatataactcgcctaactgatttgtgacttcttgaatactatcattctctttaaaaggtcgattgtaatcaacatcagtttgataactagttaaaactgatgaagcaaaattgatcttaaagctattgtagtttttttcacccagtttcttgcaaaaacgactgattgtcgctgttgaagtaaaagtcgcctcagctaactcaactaaacgcatattagccacttcttctttatgatcaattatataattagcaatccccttttcaatgtcactaaatccttttttgtattccagttttgataataaactcataaactacccccgaattactttataaatattgtcccaaatttttttccattataacactaataagggcatgttagtcttttttaacactattttaacactattcttttttgatttttctaaaataaaaaagcccttttggacttttcatcatttagattaaatagtcactaaattaaaatatgaactgtcaatagatatcttatgagagtagcgactatttctacaagccaactagcctgtggaaatataatactccattgttttataaaaaaatataaatttatataattcaggatagtattttcaaaattagcaattttaaatattaaattatgaaaattttttacataatttattttttattttcaaagtcaattacttttaaagcagtagtaacattactttgataatcctttacaagtaaagacacaaaaatgacatctagaacatacattgttgcagtaaatgatgtaatcacttctaaactaaggatatcttgtgacgagtaaacattgaggtaaatatcacaatagttttgtaattcaccctttttaccaccaattgcaataacatagattcctgccttttttaaatatttagcaatcttgatcatctcactattattgccagtaaaagaaataagtatggctacacattgacgactatttttttgtgataaaatgaaatgttcgttgattccactatgtgcatcgcactcttttcctaaagtcatgattttaaaagcagcttgactggcaatcgtataactaattcctgttccataaatagaaatacgtttagcttgagataaacgattaatcacctgaatcattttattttgatctaaatccagccttgtctgtactattgatttatcataaatagttgggataactttaacaatatcttgatatgtactgttttcatcaaccggttcatcttttaaaagactactaattcgacttaattcattatactcaaattcaacctggcgtttaaattcttgataactattaacctccagctttttacaaagacgtattactgtagccttactcgtataagtttcttttcctaattcttccactgataattgatataactgttcaggatgttttaaaacatactctgcaattagcttttcgctattagtaaagcgtttcctctcccttagcttctctaagatcatcactatcacctcatcttttcctattatgacatagatatcaagatgaaacaaatttgaactaatcaattatctttttattaattaaaataaaggagattgaaaatcctcctccattttacaaaacagctaaatatcatttaaactttcaccgttcgttgcaataactttttgataccaccaaaaactcttcttgggataacgcgccaacgttccactaaaatcatcatgcacatcaacataaatatagccataacgtttagatacttgacattttgtattagcaacaatatcgattggaccccaacttgtataaccgagtacttctacaccatctttgattgcttctaaaacctgctttaaatgctcttttaaataatcaatacgataatcatcatttactgtataaccatattgttcatctacaaccaaaatatcctttgctccaagaccattttcaacaataaataacggaagctgatatcgatcataaaattgattaagaatatatcgcaaccctttaggatcaatctgccaaccccattcagattcttttaaatagggatttttaactccgctcattacatttccccgagcttgttgattaagtttctcatcagctgtagcacaataactcatataataactaaaagaaataaaatcgactgtattttttaaaatttcttcatcttctttcgtgatttctaaatgaatatgattttcttcaaaaaaacgtagcatgtatcctggatattttcccctaacatggacgtcagcaaagaatagtgactcccgatcacgtcggactgtttcctgaatatcttcaggctgcggggtcaatggatagattggactccctgcaatcatacaaccaattttaaaattcggattgattttatgagctatttttgttgcttgagcacttgcaacaaactggtgatgaattgcctgatataaaacttcgggattaatttgatcagcttttcctttaatcccaccaccattaaagggggcatgaagaataacatttatttcattgaatgttagccagtacttaaccttattacaataacgttcaaaacatacttgagcaaagttaagataaaaatcaattactttacgattcacccatcctccataattagtcgctagatataaaggcatctcgtaatgtgataatgtaactaggggttgtattccatatttagctaattcatcaaaaacatcatcgtaaaactgcaaacccttttcattaggaaccatctcatcaccatgcgggaaaatacggctccatgctatcgataagcgtaatactttaaatcccatctgagcgaacaatgcaatatcttctttatagcgatgataaaagtcaattgcatttttctttaaataattatctagtggcggaattgcttcattaccaaataccccttcaggcaaagcatcagccgttgaataacctttgccatcttctaagactgcgccttcacactgattagccgctattgcaccaccccataaaaatcctttaggaaaatttttttctaccatcttcatgactacacctcttgcaatttatttagtgcaaaagtcaataccgcttttccatccatcttgccataatcgcgcatatctattaaatatgctggtactccattagcatcatccgcaatacttttttctagataacgcacctgtggtcctaaaagaataacatctgcatcttggctgtgattttttacttctgttgctccgactgcccagatttttgtttcaattcctttttcctgtgctgcttgttccatttttgtaactaatagactagttgacattccaccagcacaacataataaaattcttatcattttaattttcctccatctcatcaattctttcaattttaaaaattactggtcttgtcccatcactacaacaagcaatcatcatcttttcatcattagtccagcctttcataattgagccaccttgcaaagctgcataaatatagcgactgacggcatcccaagcctcactgcaaaactttccattcatcatattccaaaaatcatctttgccattaccacgctccaaaataaattcctgtccctctttaaacaatggacatttaccaacttgcggatccgctaaatattgatccgctaaatcttgataatactctcttcgtaataccgtaattttacacttagacatctgtttgctcctttcaaatccttttttctacacttttaatttaacatcagaaaataaaagaaacaacaggctcgtaaactgttgttccagtgtttcatttatatattatttttataatttattttgatacttgtggtccactaaaggcattttttaatcgttctaaagcttcttttaagacccaagtagggcaagcgatattaattctttcaaacccttctccttcttgaccgaagacatatccctcatctaaatatagatcagcagcaatcattttcttctctaattctagatagtcataacctaaatttctaaagtctagccaagctaaatatgttccttctaatggatatactgtaactgatggaaaatttttcttgataaagtctaccagtatgtcatagttatgatgaatcaatgtcttaaattcagctaaccatgcatctcctttagtataagctaaccgtgttgcttcaaaagataatgtgtttaatgtaaaaaatccttttttctcttgttgcgcaataaatttagctcttaattctttattcttaataataatattagatccttgcaaacctgcaatattaaaacttttacttggtgctgtacatgttacagtaatatctccaatcacttcacttaaaacagcaattggataatgtgtataccccggcatagttaaatcttcatgaatctcatcactaagaattataattccattatttaagcaaatatccgcaattttttctagctcttcttttttccatacacgccctacaggattatgaggattacaaagaatcaataactttgtatttgcttgttttgcaagttcttcaaatttatcaaaatcaatttggtaactattttcatgatttattaaaggacatctttgtactcgacgattatttaactcaattgcccgatagaaaggataataaactggcgtaaaaataattactccgtcattttcttcagtaaatgcagttaccccatcgcttaacgctggtactacaccattagataaaacgatccattctttttcaacttgataattgtgtttatccttcatccagttaattactgcatcgtaataagctgctgttccatttgtatagccaaatacaggattattctgcataaattcaagcatcccttcagcaatctctggtgctaatttcaaatctaaatcagcgactgaaagtggcgctatatttttagcaactgcaggattatgatctttcatcccgttccatttagcagaaccattttgactccgatcaactaatgtttcaaaatcatatttcatttctctacctccattattaagtacctatatagttaagtaccttaataatagtatactctcacaatttataaagtcaaataaaaagaatcataacgattcttcattgtcttgtgcatattctttatttaaagctctttgaaccttaatataaatatctatttcttcattgctaaaactaattaaattcttaaaataacgtttcataattttcttatcaaactgaccatgtaaatcaaaaatctgcctcccgccaaccgttaagtataaattatactcacgattattatgaggattcttggttcttgaaattaatcctttttgttctagcttctttaaaatttgactgctggcacttaatgttttttttaattctttagcaatcatcgaagcatttattccagggtgatttccaattattgcaagagtgtgagtttctactggataaagcatcactttgccaaattgtcgaggtttactatcatattcttgtattaaatcataactttcgtcaattactttaatcatattatcaaatcgctcttgatccacaaaaatcacctcaggtatcattctatcaaataataaccaatgttgcaaacaatcataaaaagactggttttaccagtctttaaaggattacattaaatgtgattctttggctgtgtattcttgaactactttttgaatcttttgtggagtttctggttctaatggataccagcctttagaatacataagatcaaagacctcacgttgaatctgatatacctctttttgaatatctattaatttatttgctagttgttgatgagagcattcaatgataaaagtcgtataatcacttaataatgattttaaacataatagaacatcattgattctatcataatcattaaacgtattttcatttggtaaaattggttgtttcgttggatttgaataattttgattatccatttaaacaccccaataattcactataatgatttttaattgtgctattaacacgtcctaaagtcatcttaatatcattatcttcaacactttcttcgtaagcctttaacttcttcgataatacatataaactattcaattgatcattaaaagagccactatctttagtagatatcatttttggtggttgattcataaaattcctccttcaataatattttggttcttttataaaacaactatgcataatcatatacaaaagattaaaataaaaatattttttattttctacttataaatttttcaaatctgactaatactagagtatctttattaaaaaataaaaaacattattatcttcaataatgtttctttaccaaattaacagccctaaatttttatcctgctacttttattttattttcaatatatgccattactgcttctttagggatatttaataccgctgcaaattcttgatgcagtagatcttctgcttcttttttgtaccgctcatcagtttgacttaatcgcttattttgtaacaataaatttttttgctttgcttgaagattacaaatcaattgaatcaagccatcacaagtatattgacttatcgtttctttgtaataatctgttaattgtcttaaattttgattttcaataatctctttttgtactttaggatgtctggtcaataatcgttctaactcctctatcgaaatcaaatgacgcatatatacttgcgtatcaattggcacatacgtcttaccgtccataaaaataggatttaaagtataatactttcgggaattgggctgcttaccaatactaattactccaatattttcaatcctacaaacactttgattaccatatataatcaaatctcctttttcatacacataaccacctagctttctattaagtatatgcttaatatatctattataccgcactattagttactatatgcaaaagtaattaaaatatactaaattttcttttttatgcagctaaagactacatctttttatatttgattttactatttaaatcttgttaataatttcaacagttccataaaaacgtttttattttttaaacttaaatataatttgctgatctaaaacattcacataaaaatagttaattcctaaaaatcttttagccgtatctgtgaatttaatttcaatctttcgacaatttttattagtataacaaagtgctaaataaaataaactctatacaatttattaatcagttgagttgcctcctgtttaaataattaagtactaattcacttatactcaaaaccccatattcttttctaacttgctcacaatactcaattaattctatagtacgattaaagacaacatctatatccactactttacaatattcatcaggatccttagttggatcaatatgtaataaatcaaaaccatttaaaatatcttctttatatgactctttggcaattgccatagcttcatcttccggtaaatgatctgctctttctttatctctttgccatggtccaccatgatcacggcataaataatagacattatcataattaatttcttgcgcaatctcttcgattttttctttgaataacttttgatcactgttgaatacatatccaccaccaaatttatatgcatcaacttgattacgacttgcaatatacattaatggaaaatctttttcttttgaaatttctaaagatgcccgtaaaaaattttcagacataggtccaatcccaagtaatgtatgtttttctccttttgaattaattacataattaactgcttctctaattgtaacttttttattcatttttatcttctcctcatcatttagcaattaatcaaatgtcgacttttgatttatgagataggtatttgtttctatctacacatatatcatattcaattagtcacaatgacataagataaaacaaatgaaagaaaaagttacaaaaattgcaccctattgttgattaagaaaaaatagaatttaaactcaactagagcataaattctatttttttaaatcagcatcgctgctaataataaataattaatttttcttcatataaaactactatcttttaatcttgatggcataataatagcgtacctaataacatatattcttggagataatcaattaaaacaatttcaggaatataatctttaggaatatatttagctacctcttttttcaattcttcaatattagtaattaaaaaacaacatataacaataatttgcggatctaaaaaactgattattgatgtaacagttttagccattgcttcaatggctccttctggtgtttgatgtaattctaaaacatcttttgaatatgataatggcaaatattgtatttctccagctacatgatggtgtccagcaatcaaacgatcatttacaatatgtcctgcccctgagttcgaactaaccggttgaaaaacaaatgacagtgatgaacagttttctttagaactataatagcctaaagcaattgtattagcatcattactaaaaacaaatttttgcgaatatttcaaagtaaaatcatgagtaattgaaattttctctagcccctttatactcattgagataatctgatcaccacgtataattcccggagtcgataatccaataactttaatatctacatatttagccagcatgctatcgattacatcataataatcttggattgataaagtaggtttgataatttcattattttctaaaatactattattttcatcatataaacggtacacaatatgaacacgattactattcctaattaaagcaagacacaatgttttaacaccactaggctgcatatttttagctttcaacggtttatgcattccttttgccaaggttcgtttataattacgctcctcttcaataatcgataacatcttttttacatcatatttagcaaatatagcaggcgggatatttaaaacgattttattttttaaaatctcacatacctttgcatacatatatgagatttgtggtgccaacataatcatgtcataatcttcactagccttataaagattattatagctaaccgcagacacttgaacatcgatattaagtaactttgttatttgattgatccgatcagcaaaataacctgtcgttaacccaccagtacaacaaagtaaaacttttaaagctggtttatttgttaattgcttgatcgtttctaacatttcatcaaataattgaatcgcatgtttgatatttttaatttggaaatggagataaaattcaacttctttttttattaaattttcaaccgaaaattcaactatattcatattataaaaattaacctggctagtactatatttattcttaatagcaatcgttttataatcatccgatagacttatagctaaatttttattactttgcattaagatccactgtttaaatacctctatataaatttcactcaagaattcatccattttttcactcctttatcttctaatgattttaatagtccctgattatacatacctttattatattataaaattcatagaaaagagaccaattgccgttattctgataataatttttcaatttaatataaaaaaaggataaaaagaaataaatttctttttaatctccaatttaatctttataaaaatcataattaaacattaattttggcaactattaaaagaaacaaagctaccgccttgtttctctttattcctacataaccgtgataatcgactttccagccgttactttaccatatttttctaattttaatgtttttcctttagtatctagaaaaacaatcataattgtatagtcaatattttcatttcttaaataattaagatctagtttaataattttttcaccagctccaactttttgatttttcttttttaatattgtaaatccttttccttttaaattaacggtatctagtccaatatgaaccaagatttcaacaccgtcatctcgtgtaattccaaaagcatgaccagtaggaaataatgtcgttaatactcctgcgcaaggggcacagacctctgacgaggtcggaacaatagcaaccccttctcccattactttttttgaaaatacattgtcatcaacatattcaagattaaaactgactccatttacaactgcatatacattatttgtatttttttgattattttttaatgatttaaatatctttatcatagtattaactcctaaatttgctaatgactattttgttggaagtttttattttttactggaacatcttcaaatcctgagaaataactcaccacactagatacaacaaatgccgcaataattgcgataatgacgccaataatcgtttccccataaataggaagtgccaaaatactaggattaccataagcaaatgcctttactccaaaaaatccagcaatacaaccgccaactgcaccaccagccataacaccatacattggcttttttagacgcagattgattccgtagatagccggctctgataccccggctagaatagccccgacaccactactaatcgcttgtgaacgtaattctggattcttagtttttagtgctaccccaaaacaagctcctccctcagcaacattatgaacaaattgtgttggccttaaaaaaccttcataacctaatgatgcaatactttgcatcattacagggccaaaaacagtatgcattcctgacattattacaaatggcaatacaccaccgagagctccaagcgcaaatggaccaatcgtgctttgcatccaaactaagaaattaataaaatattcaccagcaaaaaaaccaattgggcctaatacagtaagggttaaaagacttgcaagaacaagcgttaatccaccaacaaaaattcctttaaacattcccggtaaatacttattcaaaagcttttcaatatttgcaactgctacagttgataatattgctggtaaaaaagatgaagcataacttgctgaataagctgtgaagcctaatatttttaagggctcttcagcacttaacatcccaataatatctggatggatcagtagacaagctactatcatcgaataaataggtgtacttcctaatctgattgctgcaccgtatgctacaaaaacaggcataaagtagaaagaagtattaacaataccatttataactagatatgtttgattatcaacaatttccggccacgctaatgaggttagtaccaaaaatacttttattaatccagctacagtaagcccaggaatcattggtgtaacacatgcagataagaaattgaaaatattttttattcctcttttccaaattggcgaatcatctttttctttaatatcttcatccaaactttcatcaataatttctgctacttcaaaattataatttttaactacttgagtaaatgtcgcagataaatttttccccataattatttgaaattgaccggcaccaaaggttgagcccaacactccatcaatttcattaatcttatcttgattaactagatttttattttttaatacaaatcgtaatcttgtaacacagtgggttacatatttaacattatcctgtccgccaatcgttataatgatttgatcggctatttctttataatccatattattctcctctatattattcttgaaatatgtactaataaataaaatcgttccgcctctgatagtacataatcaaattcttcatttaaatatctttcgattgaatctaacgtaatacctatttttttattaatatctgacttagcacttattattaatttttcaaaattctcatcatcactttcaccctttatcacccgctgcataaaaaatttaagatgaatcactagcctagaataatacagtgaatcttccggtagttcaagaccaaaattagcttcaattatatttaaaatatcatctatgctctttaaaatactcgttgttttgcttacattattattaaactcagcattaattaagtgaaatgctatagcacttgcctcttttttatttaaatttatttgataatatctattaatcaaatctaatgctttaaggccgacttcatattcttcatgatagaatctttttatttcttcactaactaaactataactaccataaccctttagataatttttggaaacaaagttaatatggtctgatagcgatactaataatccttgattaaaatttctatttaaatcagtttttgccatatctataatttcttgggtcaattcaatacatttaaatggaatttcattcagtaaggctttaaattgaattttcaataaattattttgtaacgtataaagcttgtaattttctttcattgttatataatcattaactttatgattaaatcctacgccattaccaataataattatttctgttccattttctaatatttcaatggcattattatttaagattttattaattctatagtatttatttttcatatctaatcctctacatttattaaaatgttaaatcagacccgtttgttttaattaccttcttataccaataaaatgaatcttttctataacgctgtaatgatccttgtccataatcattcatatcaacatatacaaaaccatagcgtttcttcatttgtccactagctaaagatattagatctgtacatccccacatagtgtatccaaaacatggtactttatcaatgacaatagcatctctcaattgttttaaatgttcagccacatattttattctgtaataatcatgaatttttccattttctaaaatatctactgctcccattccattttcaataacaaataatggtttttgataacgatcataaatttcatttaaacaatagcgtatacctaatggatctattcctgcaccccattgggtcttttttaaatacggattgggttccccacccatatgatcaactttagaatcagcactaacaattgaagaacgataataactaaatgaaataaaatctaaagtatgttttttaatcaagtttcgatcttcctcacttactttcaatttgacatctttcttattaaaaatatcttttgtataatttggatatgacccgcgagccattacatcaacgaaaaataatgcttcacgtcgcttacaataagtggcaaaaacatcttcaggattacatgtagctggataaatttcgcttaatgcaaacattgctccgaattttatgtctcccataattttctttccctgattaattgctttagcacttgctacaaacatatgatgaactgcttgatatctcgtctgactatcttgtctatgggttcccatttgagcgtacccacctaaattatttatttcattaaaagtaatccaatatcttactttatctttaaatcggttaaatagtgttgttgcataatttacatagcatccaatcgtttctcgccccgcccaaccatcatataattcacataaatgaaagggtacttcatcatgacaaattgtaatcattggttcgatattatattttaaaagttcatcaattatcatttcataaaatttcaaaccatcttcatttgctttttcttcatcaccatttggaaaaattcgactccatgaaatagaaaaacgataaactttaaatcccatttctgcaaacaaagcaatatcttctttccaatgatgatagaaatcagtcgcttgatggctcggataatatatatcatcataaatatacggtatagctccatcgggaattgagtctcgataatcaatactccccctcgttccattatttaattttaaagtaatttgtctttctttatctatgtcaccagcagtttcaaaatcatgactcgataagcctcttcctttttctttatatccaccttcatattgaaaacaggctgtagcacctccccataagaaatcttttggaaacctgatcattttcttacctctcttcctctctaatttgccaatataaaaagggcaataccaaaaagaagctaaattcttttttggtattgccccttgtttttcccgggtaacaagccatatttaattgacacttatattttatcatataatttattttttgcaagggctttcaaaaaataaaactatttacaatattttgcttattaaaagtaaaagcacaaacacataggtaaagagactaagtaaaacagctccaatgcatctaattatcaaaataccagtgagagtaaatatgccttttttgaatttggaatttctatcctcataatcattagaataaagtcaatcaaataaatatctaaagctattgatgaaaacaatgttttaaaaagatttgattctaaaatgattttctccatttacaacatagtcacttatcacatagatgctaccagcaccataaagattgctccaatattaaaagtacttaaataagttactgtcaaagatggcattatcgcttgaataaacggcaaaacaaaccttccaatgttatatacagaagcatttaacatagagactcctttcattattttggaatctcttaatttaacatgatagctaacaaccgccataattatattatttaaaatttctagaataataaaaagcatgatattttatgtcaatcgaatctcacggttcccgcaagcaatgtccatggacatgtaatgtttgttataagtaaagcaagaacatacgaatcactttctttaatatatcctcttaattttataaaacatgctaaaaagataatcaaaataaataccattgcttgttgtattactgacgtcataaatttttatcttctattcttttgtaattactatgcttatacttgatgtatcgattttaataattcaatacccgtttttgttttaaatattttttccataaaatttcttatatcttcaacggaataattgctgctgtttcaagagcttttaagtcttgctgattcagttttactaattcaccaatgttttagcataagcatgcacttttaagaaatgtttaatgttatagttatttccattagcatatttaatcattttatttgcaatattataaatcatcacaatccttcttaatctaataattaatcctaataaaagaataatcttcatatctattaaaataaagattttttatattctcacttattttcattatttaataaaaaaagcgcaactaaattacgctctaaacttttatatttttgatagcagtacgattgtctcaacatgactagtatgagggaacatgtcaaccggatacattacctcaccacgatagccaatttttgcaaaatacttgatgtcccttacctgagtacttggatcacaagaaatataaacaacttgtttaggattcaagatttttacagcatccataaattcctgcgtactgccactgcgtgggggatccataattacacaatcaactttttgcttctgtttagctaatttaatcataaaagcagaagcatcatcattaataaatttaatattttcaatcttattcattttagcattattgatggcatctttaactgcatctttatttaattccacaccagtaacttccttagttctattagctacaatcattccaattgtcccaattccacaataagcatctataattctttcttgacctgttaaattcaataaatctagagctttagaatacagtaattcacactgttgatgattaatttgataaaatgattttggcgaaatcttaaacttcaaaccacacaattcatcaactataaatcccttaccataaagaatcttttcttcattacctaaaaccacactcgttttacgtttatttacatttaatacaaccgtcttaatacttggaaaatttttaatcaactcattacaaaaatttttggatcctttaaatacattatcattgcaaactagtactaccattgtctgatcagtaacaagagcacgtcgaattaatacatgacgcaataatccgcgattacgattttcatcataaatactaactcgatatcgttttaataagctttgaatcttcttaataatcatatcactgagttcttcatgaagaagacaacgatcataaggaataatcttatgactatcctcttcataaaagccaaattcatatctatgattaaaagcaacaattattttattacggtattcataaggatgccccattccaatagtatccttgacttcatacatgtctaatttattatcttttaacagcttcttacaataatctgttttaatctttaattgtctctggtaatcagtattaatgtatttacagctaccacatttcttctctattaaacatttcattttatcacctagcaacagtataacataactaaagcaaaatactaatcaattccttctctcattattatttcttcataaataaaaacaaggtatagtttgttaccaaactatacctactattaatcttcagatatctcttcttcaatgtgccccactacttgaaatgacttatcagtatactgcataatttcaaatttattaccatcaggatcatgcacccacatttgataggtatgtgatggacctttagaaataggtgtatctattgcaactccacattcaactagttctcgataagttttttctatatcctcaaccaataacgcaaagtgtgaataccccagcctctggttccactcatcatgtggcgcttgtccttcatcctttggaaatagttcaataaactgtccaggggcaatttcaatataaacaatgataattctgtttggatcaacttcagctacttcactatatttaccacgatttagtcctttataaagtcccgcccttgttacaattttaacttttaatcctaacttattttcataaaagtctctcatcacatccatttgatcagtgaaaaaagatacatgcatcaagcttttaaattccatttgtcttctcctttaattatcatttgtaaatactattttttcttgatttcttgcctcattcatgactttagctactattaaacttaattccagcatctttttagcaaaatcataatcattattatcaatgattctaataaattcaataaattcataatataagcgatgttcacaatcatcaactcgataaatttcttcagtgccatcgttaaaaataatttgatatccggtcatctgattaacaggtttatcaattttaataacccctttatcaccttgaatcgttgaaataatcggtgctttgcaatctttagcccctatacttatccccttaaacgaaccataatcgtacattagaataccacttgtatcaatttgattctcaatatttgccatatacccaatacttactggttgaccaaataaacttattattgcattaacattataaacattgatatccatcaaagctccacctgatttatgataatcaaatgccggtaaaattgttccttgtttaaaagcatcatatcgtgaagaatattgactataattaaaattcatgattttaatatttccaattctctttatatcttctttcaattttttaaaagcaggtaaataatggatattaactgcttctaaaataattagatcgttttcttgagcaatttcttttaattcttccaattccttaacatttgaagtaataggtttttccattattacatgcttaccttttaataaagcttttttagcaaaactaaaatgtaaatgatttggcaaggcaacatacactgtatcgatttcacttcgcaacatttcatcatagtcataataacaatgatctagatgatattgcttagcgagaatagtagtctctttcttagtttgttcagtccctaaaatcgaaattgattcaatctttaacttatttatagttgttaataagtctttaacaatcatccctgttcctaaaatacctaatttcatttaatttgcctccctaattatttctgttaattccaatatcctttttgtatcttccaaactatgaagtgcactctcagttttatgagctcgtacatcatcaataaagcactgaatctccatagtcatatcatctccaataattggataattgcgttcaaccacagtaccatcattttttatgattttataatcaataatacgattaaacattggaatctctatttttccaaattcaccttcgataattgctaaacgctctttattacgatcaattgccccttccacaatcgcagtacattcattattaaaattaatttttgctttaaaataccattcaactccagcaacaatatcaatctgtgaattaacattctttatatctgaatccaccaaagctaatacaaaaccaagcaaataacttcctacgtcattcagtgccccaccttgatcaacgttaaataaatatgaggtagtttggtgagcagtagcatcaaaacaaaaattagcttcaatttgtttgattttaccaatcaatgataaatcctgttttaaatgttctaaaccaatattaaatttagtctttaatgcttctaagcaatatcctttttccgtatatacttttgttttaatctcctcaatatctgcaactgtcaataccattggtttttctgataataccgcaatatgattatcaagtgcttttaagatccattccttatgatatttatgaggtaaggcaatgtatacagcatcaagttctcgatcctgtaataattcgtcataatcttgatatattttaacttctgggtgagcctttacatattcatcatcacttgttaaggaatgagatgcaattgcataaatctttccttcgtcagtgtattcaatacttttaacaaattttcttgcaatattcccaaatccaataattccaaaattcattgattttgcctccttttccttgttataacataactatttattatttaaatatatttataatattctggaaacaaagtactaagaaaataaaaaaaatactgtgatttttgtacttttagtacaatcacaatacttttatataaccgtcataatataattgacccataaccagctaattggcataacaataaccattgcaggaatcatatccgcaattggaaattctttaaccttgatcattctaaatcctgtagcaatcattaaaaagccaccacaagctttaaaatcattgatcattgctggtgtagtcaatggaaaaataaactttgctgataaaaataaaataaaaaagattacaaactgcggaatggcaattacagataccacataccctaaattacaagcaaaaatcgcagcagtaaaaaaatcaagaattgatttagaaatcaaaactccattatcacccgtcattcctgaagttaaggagccataaattcctgttccactagcacaaaataacacaataatagtaattaaagtagattgaaactcttccgaacttaaatcactaccattatttttaaatattttggcaattggcttttgcattaaaattgctcccttattgatccaatcactaaagtgcagtgataatcccacaatagttccaataattattgaaaagattactgccggcatattttccattaatccaattgcattgattcccatagccatagcacaaatcccaaaaatcaaggttatttctgtcttaagtctatgacttaatttatgacctaataatgcaccaaatattccccctaatacaattgataaactattaataatgactcctgttggcattatttttccccctttataatttgaaaattatttctctaaaagattccattcactctctttataaagaatatcatttttattagataattgccaattaaaatagtttcttgtcttattaagaaaaaaaaggacatgattctataggctacaatatttgaaccataaaatacatgatgttataatataaagacaaaaaggagatgaactatatgacaaaagtagatattatatctggtttccttggagctggtaaaactacattcataaaaaaattaattagtgatgtatatccaggagaacaaattgtcttaattgaaaatgaatttggtgaaattggaattgatggaacttttatgaataatgctggaattgaagtaactgaaattaattcagggtgtatttgttgcagtctagttggtgactttgaagcttcattaaaagaagtattagaaacatatcatcctgatcgaattatcatcgaaccttctggtgttggaaaattgtcagatgtaattaaagctgttagtgatgtacatagtcatgaattagaacttgataattatattgctgttatcgatgctaaaaaatgtcgattatacacaaagaattttggagagttttttaataatcaaatcgagtacgcctcacttattattttaagccgaactcaagatataacagaatttcagctagatgagtgtttaaaaattattaaagaacataataatcaagctaatgtcattacaaccccatgggatcagcttaccaaagaaatactaattaatgcctttagtaatagtgataatcttcgtgatgaattgttggaacaattagatatttgtcctatatgtgcccatcatcatgatcatcaccacgatcatgaacatcatcataatcacgaacatcatcatgatcataattgtgagtgtggtcatgagcaccatcatgctgatgaagttttcaccagttggggtaaacagacacctaaaaaatattctaaatctcaattagaaaaaatcttaaaagaactaagtgacagttccgcctatggaaatattttaagagctaaaggatatgtcgatagtattgaaggtgattggtggtattttgacttagtccctggagaatatgaaattcgtataggaaaacctgactttacaggtcgaatttgtgtcattggcgaaaaattagataaaataaaattagatagattattcgatgaggtcgcttaatggaaacaagagtatatattttcgcaggctttctagatagtggtaaaacctcatttattaatgatactttaatgaatcctgatttttatagtgaagaagacaccttattaattagttttgaagaaggtgaagttgcctataatgatatttatttaaaaaaatctaatacttcattggtaacattagattttgaaaattttaccacctatgatctaaaacatttagaattagaatatcgtcctactcaaatcatgattgaagctaatggaatgatggacctgaatatttttgtaaaagaaacgattcctgaaaactggaaagtggtccaagtattaacaacttttgatactactactttttcaatgtatttaaataatatgcgttctcttgtatatagtcaggttgtctttagtgatcttgttatttttaatcgctacgatccaaatattagaaaatccatgttaagaaataatattaaagcgattaacagtaatgctcaaatcatttatgaattagctaacggcactatagatacaatgaatcctgaagaagaattaccatttgatattaataaagaacatttagatatacaagatcatgattttggaatcttttgtatggacgctatggatcatcctgataaatataatggtaaaacagtcaaaattaaaggtaagtttatcggtctagatcgtgtcattgaagatggttttgtcctagggcgtcaagctatggtatgctgtgaagaagatacctcattgattgggcttgtctgtattagtaagctagcaaataaattgattcctgaagaatggatcgttgttgaaggaaaaattacagttgattatgatccggaatatcaaatgaatgttcctatattaacagtggagcacctcgatgtagtccctccattaaaaaaccaatatgtgacatttgattaaaaataaagatgcctgctttattataaaaaagcagacatctttattattttccaagtttttcaactatttgaactactaattcttgaccattcatctgaccataaacgaatggatcaattacttcgatcggtttttctggcaataattccttaactcgatacaaatcatgttttatttgaggagcaataaaaatataatcagcatatttccccaattcattaatttttaagattggataagcatatacttcataattatacccctcttgactaatataccttttcatacaattaactaaaatacttgttgaaactccctgtgcacaaaagatatatatccgcttcattattcagcctgcaaattattttcttcatcaagacatttcttatcgtatactttgatgaatggataccaaataaggccagatacaatgaacattacaacaaagataagcaccgcacgccaatctaaagtacacaagtattggaaaaacggcatcggaatattagaactagcagcaattacagctttacccataatgccaaaattcatacagcaccaaattattcccatattgattgtgtaaaaagcaatccatggaattcctaaaattggattaaacataattggagctccatattgaattggttccgcaatattaaaaattgctggaacaatcgatattttccccattgatcttaatcgctcacttttacattttaagaataatagaggaattatgtaacaaaatactccagacatttggaacattggtaaagtgaatatttttgtagcagtttctccggctgcataagcagcagcattagcacctgtattggctatcaataacggaagaattattccagatacaacattaaacccatgtactcccaagaattgtaaaaatgcaataataaatgccatcaacatacagaaccataatgattcagaaccttgaatcgccggtgttaataaactcattatccaagatggtaatagcatccctgtaaaattttgacaaagtaaagataatccatagaaaccagcaacgatcaagcacatcggaataatcgcatcaaatgaagcagctactgctggaggaacactatcaggtaatttaatttgaatattacgtctctttagtaattgcatgatttccacggttaccaaagcaacaaaaattgctaaaaagattccttgtgatcctagataagttgcatccatattattatcaacaattggtgctgccaaaacaataaatgataacagcgatacaatcggcgcttgtaataaatcaagtttatatgttcgtgcatggtaataagcgatagcgcatactgcaatgactccaaataaaccgaaaaccatattatacgggaataaaattgcatcctttatcgtctcactataactaggtatgaatggaaatatatctggtaatgctgaaataagctggaaaatactcccaaaaatcgttaatggcattattgccattaatccaaaactaatcgattgcaaatgcctttgtgttgctaacttattgcccacttcaataagtttatcttgtaattttttcattttattttcctcctatatatttgctgcaataaaatacgcatcattagttgctccaactacttgtcctaacttttcacaatcaccaaacatcatcgtttcatcagctattccatacaatttaaaagcttcctcacgatttggtttcattccaacagcaattatggcattatcacatttaataatagattcgccatttttatttattattttaactccgctttcactaaatcctaagcattgactatttattaaaatggtcaactgtttttcaaatcgttttaacaaacgccttaatcctgctcgatataaaatatgcccttgactagctatttggtcagtcatttctattactgttactaattttccacgttctaataactctactgctaactctattccaacttgtcctccgccgacaatacaaacattatcttttaaagaatccaatttaggataaacgttttcaaaataatcaacatattctaattgttcccctgggaaatggaggcgaattggtgaagctccaatggcaacaagcaccacatcaccatttagttgctctaataaatttttagtagcggtcgttttatacataacttgaatatctcgcttgttaatttggttttctagataatctcgatatgcttttaattcctgtttatgcatttcatgttgggccaaatttaattgtccccccaatttatcacgttgttcaatcaaaataacttgatgtccccgatcatgtgcagttattgcagctttacaaccagcaggaccaccaccaacgacaatcacttttttaataatctcacttttttctaactttaatggtacccgatgttcccgacgatatcgagggtttacagagcattgtacatttgtatgttctgtagcactatgatagcattgtaaacagcgaatacatggtacaatatcatcgctttgcccctgcattgcctttcgtggtaaaaatggatctgcgactagaggtctacccattgaaataatatcaactacaccttcttgtaataattgctcagcttcttttggcgtcattattgaaccaattacaccgactagtttattaggaaagttttgtttaactaattttgcccaatgaacattagttagatgcggttcaaaaatactttgacaatgtttcccattaacactataccaagcttccaatcctaattcaggctctattatttgatcttctggaaaatatcctggaatcatatccatcccagctgatacattgatcaaatcaacatcatcttcgattctttttaataattccaacatttcttcaaattggtaagacccttttaaataatcactcgctcctaacaatataacaattggaaagtctgtgccaacagcattacgaatcgttttaacgtgctctattgtaaagcgcatacgattttctagcgaacccccatattcatctgttcttttattaaatactggagataaaaactgggttgttaattcttcatatccaacgtacaaatagataaaatcaaaaccaaatcgtttgattgccaatgcatcatttcttgcctgtttcataattccctgaatatcttcaagcgttaattcaactgcacgagcgccacttcttgttaaatatggtgatggtgctaaaacctgcttaccatcataatgagctcgaatatcattagctgcatcttgttttagtcgtggtacacaccaagttccaaccttagccccatactgacgggctactgaaatagattcacgaataccatcgcgatcatgttttggaaattcaccattggcattagccgcagattcaattgatacaaaagtcattgctgctccacctacagacttatctataatactaacatttccatagtgagtcgtagataataattcatggctcttgggaatccccatcgttgatgcaataattctatttttcaacatcattgtattaactcttaatggttgaaataaatatggataatactgattcattttccaactcctccttgctctcttattgtatgtcaaatagcttttgcatccaaaccagcttttgccacgatcatggcaaaagctgaatcacaattttaagatttctatcaagaagtttgttataatatgataaaggagtgattattttgcttgaacttacctctagacaatttttaattattcgtctattacaaaaaaataccgttccactaagtgctaatacgctatcaagattactagatattagtcctagaacacttagaaacgatatttttcaaattaataaaaatattgaggattttcatatttcttcatccaaaaatggctatcaattaactttattaagcgaaaatgcccatatgcttataaatgatattaaaatatccgaacaatcaaagtctaccaatataattttacaatatctgcttaatcacccatcatgtcacttattagagttatcagaaaattgttatatgagtgaatccagtgttgctcgctgtattaaaacaatcaaaccgcttttaaacaaatatcatctaacagttgaacgaaaaaatgatattttttcgttacatggtagtgaatatgataaaagagctctttttgctcatttaattgggattgaagcttcacaaccaataactagcctacaacactttcaacagtattttcaagattttcatctttctgaagtagaagctataatcgactctgttttaaagaaatataatattcgagttgacgatattcactatcaaaatcttgtgatgaatacatctatcacgcttcaaagaatttttgttggaagcgacatcgaacccctgccgttttcatactccttatcaaatgacgaaattatttgccagctgtccaaagacctatgtcataacctagaagaatattttaatcttcattttgctcaaacagataatgaatatatgcaagtcctttgtattggctcgattaaaataaacgaagaaaattatgaaacccaaattttatataatgattatagttttgtttataaaattaaagaaattctcgatgatcttgttgaacacttttcattgcaacttaattatcaaatgtctttaaatcattttgctttacatattcatcgtttattttttagaaatcattcttcgctttactttcaaaatgacttccataataaccttaaaaatacccatcctttcatttatgagttagctgtttattttgcctataaatttcaagaaagtttcaatattacagtgaatattaacgaaattggcctattggcaattcatttaggtttaatgattcaatccaatgaagaaaataaacaatatttaaaagcactatgtatttgtccagagtataatgatttacgaaagcattttgccaatcaatttttattaaactttggtgataatgtacaattaattagttttatttcttctaaaaagaatattcaagactatcattttgattttttgatttctactattaatgactatgaaagccccgattgtatggtaatcagccccttgctattatcacaagatattgataaattgaatcttaaaatcaatctattaaaagagaaaaagaaaaaagatctgctaaaaaaggaattatctaaatacattgatcctaaactcttttttagaaatgttgattttacatgtaaaaaggatgctattttatttttatgcagtcaaatgttaaaacatggtgatgctaaaacagattttgttgatagtgtatttgaacgcgaaaaaatatcaacaacttcattttttaataaatttgcagttcctcatgcaattcattttggtgatgtaaaaacccgaattacttttttattgaatgacaaagcaattccttggggtgatacctccgttcatttagtcatgcttatttcaataaatgaaaaagacataatgactttcaatacaatctattcttcaattattgatcttttattagatgatgagtcttttgatgaaatgttgaaaatcaaaacatttgatgaattatcagtttatttagaaaatcatgtttaaaaaagttgtaatgctttattcattacaactttttaatctttatgcaaagatatttcatttattaaaatattatgttcccgatgatttgaatccacaaaattaactgtaccattttcattcaacttagtaaatgtaactaaaccataatcttgaaattcaacctgtttatcctttaaataagcaatatcattagcataatcaagaattttatcatacgaaccttgctgataaagactatagtatatcttaaaatatgttaacattgctatcattagtgatttaacttgatatgtctggccagttttcatcttcattgaagcataatcaccgtttattgaattaacatttaatccaactccaactacaaccccttctaaatcagtttgatagattgcctctactaagattccacaaatctttaaatcatcaacataaatatcattgggccacttaattttagcttttattccataacgatctagtaaccccgccacactacaagcaactagctgtgtcattttatgaaggtcttgaggttttttaaaatcttttaccaaaatactcatcagcaagtcatcaccattcttactttgccaaacgtgtccattccgaccccgaccatttgtttgataattacaacgaactacacttagattaggaagtttatttaaattacgttttacgtaatcatttgtagaatcgacttcgtctaattcaatataactcataatatcaccccattactatacttctattatattagaaatttaggaaaacaacaaatatttattataaagttttattctaatgcaccctttactttttttctagtgaaacaacgatcttgacgattagctaaagcgctaacccgggcttctagcagtatttttctaccactttcattacgagtataaataacctgataattaccaataaacggcttcatatagccagcaaatatatgcgcatcttcttttcttttagcaaaactatcaggaattgcaaaataacaatctaatttattttttcgtttaggattataaagaatataacgttgattatcaatagatgcaaaaaattcattgatgcatttggcaaacaaagccttatcatgccctgttccccctaataaatatattgcatgtatcgcattaaaagaatctgtttcaacgcgactattcaaagaatccagctgattggttttttctaacgcatttctaattcctttgccaaatatttctaaacgacctaaaggatttgctaatgtataaagttttttgatgctcaaaagaatactcataacaaatattccaacataaattatcaccactagatattctaaaatatctatcaaggtcaatgattttagaaatggtattccaatgacagcaccaataatcccactaaaaacaattatcaataaagttcttaaagcatccataaacataacgacagttataaattcttctttaacttcagtttcttcaacaatttcaattttgtcatagacagctaacgaatcttcccatcttttctttaattgactacgctttgaagatagtttaagcatatctttattaattttttttatattttctggactaaatggcaatttaattgcgctaagtcgcaagattccattttcaattatatcctgctgataatgcaaccctaaaaaattttccattctccttgcaagcgtttgaaaatcttcactaccgccatcatcataatgacccgttaacttttcttttggtctaacacaaactaaatgccaaatattacttgttttattgggcgttttctcaaaaactctaatagctcgtccacgcatttgattacttaacatatatgagcctacaaagctagccaaaataagcgaattaacacacggtgaatcccaaccttctccaagtaaagatttagttcctatcaaaacttgcatataaccctgcgcaaatacctcactgattacccctgttataaaattacggtttccactaatttcaacttttacataatcatctaattttccaatttgatggaagctgattttactaggttcttcaactaattctattaatgctgtttgagcatccttggggataataatcattgtgccacataaaacaccaaatttaattgctgtcttatttttagcactatcacgccttagttgttcaaaaaatggtaaaacgcctaaattattcacatctttgctttcatcacctaatgcccgttcgtattcttttcgaatataatcagtaagaatcaaaagtcgtaattcttgtttcatcgttttatattcataattaacaatttctttaatgctttcacatttaccaaccgaatttattagcattttttcaattgcttgatttaaacacaaagaaacttttcgtttttcgattaaacctttagacttcaattcacgaatcaattcatcacggtattgttcttcaactcgatatgaagcaatatcatcatataaaaagccttgcagtaaaatttctaaccatttaagtgataagggttctaacgatttatatcctaaaagcttttgatacttattcgcactgcacactcccttagtatttaaaaaaattatcattgctgataaatagctcggatcatctaatagctcatcatcacttacttcctcagtaaaaaagcgatgactcataatagccttacaaaaatattcatcttgtattagctgctccaaaatactttgactattttcctcaaagatacttaatttttgtttttcttgagaggccggataattgaaataaacataatcttgatgtggacataaagtaccatctttaactaattctggaactgttatctcttcatcaatatcaccacacatatccatatacctagtccacatgcttagattagaatcatatggcggagttgctgttagagccactgtgaaaatattattaaatgcttttttaaattcttctaatgatttccaccactcacttcgaagatgatgacattcatctagacataaagttcctaattggcattctttaaaattactgattacatcaaaattatgataatcaacttcttcaactgttttaaattcatcattagtctctactagttcaccacaataatgactcatcgcactatgtagtgcctgatatgtcacgacagtaattaattttggtttttttaaatcttgagaaagatattgatcgcgattttcttgtttaactaaaaaagcttcacaaatacgctctacccattgttcacgaatcgttattgatgggactaagattaaagccgagtaatcgattctttttattaattcaattcccaaagttgtttttcctgaaccaggtgcagcaacaatatgaattttacgatcttgactataacggtcatatttatcaagaacacgttgttgataactgcgccaagtgcccttgaaatgcaaaatttgttctaacatccaatccctcctattacctttatttatacatatcaaccttaaaacatcaatacaaatcaacttaattttatgataaaaattctccttccactaaaaaagtagtacaataataatcaaaggtggtgtaattatgacgatgtatattcaaacccaaaatcaatatacccaattccaaagtgatgagttaactgatttacttggtaagattagttttactatcaataaatttggactttggcaaagtaatcacgatactagagcaaattatattactgatgatattgaaattgtctattatcgagaaggtgggtctattacaaccattggcaataaaaaatacacctgcccaccccacagctttctcatcatcgaaccctataagctcaacacttcaataaatactggaaatactaactacagctattatttttttcattttgatattgaacccctatcattgcgccaacaatttattactctcttaacaaaacacgggcatttaatatataaagaagaaataaaagacttcaaagaaatgctagaacgtttattaatcgaagctagtgaaaaagaaattggctattcaagcattataacctctgctttgattcgagttgttgtagagataatccgcgctcagcttaaaaggaataatgaccatatttcacaaataacagatttaccacatatcgaattagttaatgatgccattaagtatattcatgaccatcttcatgaaccaattaaactaaccgcaatggctttacaactaggtgtttcaacaagtatgttatataaatcttttattgcaattttagcaattcctccactaacttatattcatcaacaaaaagttctctatgctcaaagaatgctggctcatggtaaaagtgttacaatgattgcaaatgacctgggatattcatcagcctatcatctatctaaaacttttaaacaaatcacaggggtcagtccacgtgaatataagaaaaatattaagttattataagcatatacgaaaatgtatatgttttttaattgatataatatgttttatatatatgtaagtgctatcatatctttataagggaggtatgaatttggaaaataaatatcaaaaactctttcaaccaataaaaattaatcagctggaagtaaaaaatcgaatttttatgtcgccaatgtcaacaaactttgcaacaaaagatgggtatgttactgatgaaatgatctattactatagcagaagagcaaaaggtggcgttggtctgattgtaactgaagtaacaatgattgagccaacctacaaatatattgctcatactttatcagttcaagatgattcctatcttgaaggatggcaaaaattagctaatgaaattcataagtatgatagtaaggtcgtagcccaactactacacccagcatatatggcaattcctttcccggaaacaccacaattagttggtccaagtgaggttggtccatactatgctaaaactcctccgcgacctttgacaaaagaagaaatcagtataattgttgaacaatttggtgatggtgccttacggttaaaaaaagcaggaatagatggtgttgaaattcatgctgcacacgcacatgcattactaggaggatttttatctccactctataataaacgaattgatgaatacggtggtgacataactcatcgcattcgtctacttttagaagtaattgcaaatgttcgaaaaaaatgtgggcgtgatttcgctattattgttcgtatcagcggtgatgattatgaagccggcggacaatcattacacgaaggatgttatattgctaaaagattagaagctgctcaagttgatatgatccatgtttctgggggaactactatccaccgcggcagctcaattgcaccccctggaacaccacaagcgagtcatattgacagcgcacgagaaataaaaaaatgtgttaatatccctgtttcaaccgtaggacgtttgaatgaaccttggattctcgaagaagttttagaaagagatttagcagacgtatgtatggtaggtcgctcactcttatgtgatcctgattttgttaataagatcaaaaatggtcaagaagatgatattcgtccatgtattggatgcttgggatgtttaagctcgaccatgttaaaagatcatgttgaatgtggaattaatccatcattgacaagtgagaatgaagaaactgtaacacctgcgacaatatcccaaaatatcctagttatcggaggaggtccagctggattagaggcagcttatattttatcaaagcgtggacacaaagttacccttgctgaacgtcatcatacattaggcggcgcaatgatcgttgcaggttatcctattgctaaacagcactttgctcaaactactaaatatttcattaaacgagtaatcgattgtaatatcaaaattgaattaaacacgattgttgatcaagcctatttatcacagcatcattatgatcatatcatcgtcgcaaccggagccaaaccattacgacttgatatttttaaaaatcatcctcatactggtaccggacaagatgtgcttcttggcaaaatgtggacaggtaaaaatattgtcgttgttggaggaggctctgttggctgtgaagttgctgattttgttgccccattagttaatgaccgccatccaaataataaaaaagtaactgttattgaaatgaaatcaaatattattatggatgatacttcaccatcacgaagtattttagttcaaaggatggctgataaaggcgtgaacattattactgatagtagagtcgttaaagttacaccaacaactctcgaatatcaaaaagatggcaatactattacaattgagaatgttgatacaatcattgaagctactggttattatgctgatcatgagttaaaaaaaaccctcgatcaaatgcaacttagctacaacgtcttaggtgacgctgcaaccccaggaaaaattaaaaatgctataagtgacgcatatcatttatgtaaaaatatttaatcaaaggagaaaatatatgaatttactaaaacctattaaagttggaaaaattactttaaaaaaccgaattatgtttcccccaatgacaaccgggtatgaagaaagagatggttcaatcggtgaacaaagttttaatttctataaacgtttagcgcaaggcgatgttgcttatattgttttaggtgatgttgctccagtcaatactgtttcccctacacctaaactttttcatgacggtcaaatcgaagctttcaaaaaattaagcgatgccttacatgagtatgattgcaaactagggattcaaatctttcatcctgaatatgatgttgatgctctagcagaattatttagaaaaggtgatatgcaggctgcacgtgctaaattacatcatgacatgctacattatatcgatgaagtaactgaagcccagcttacagcaattattgataaaatcggcgcttgtgttaagcgtgctgccgccgcgggggtggatgttattgaggttcatggtgatcgtcttgtcggttccctttgctcaaccattctaaatcaccgaaatgataattatggtggttcatttgaaaaccgtattcgctttgctctcgaagttgtcaaagtaattaaagaaaatgctccagatatttgcatcgattataaactgccaattatcactgaaaatccgcttcgtggtaaaggaggcctaaaaattgatgaagctattaaattggctactatcttagaggctcatggagttgatatgatccatgttggtcaagccaatcatactggaaatatgaatgataccattcctgcaatgggaactcaaccatactgttttatgaataaatatacaaaacaaattaaagatgttgttacgattccagtgtcttctgttggacgaatccttactccccaaaatggtgaatccttgattgataacgggatttgtgacattattggtttaggtcgttcattattagctgatcctgattatgttaaaaaattaaaaaataatgaagctgctcgaattcgtcattgtatgatgtgtaataaaggctgtaccgatgcaatccaaaatagacaatttttaagctgtgttttaaatgctgaaaatggttatgaatacaaacgaataattaccccagcagcaacaaagaaaaaaattgtagttgttggagggggaccagcaggtttagaagctgctcgggtagcaaaaacaaaaggacatgatgttattttatttgaacaagacactagattaggtggtcaacttaatattgcagcgattccaccacgtaaagctgaaatgaatcgggctatcaattacttatcaaatgaaatgaaaatattgaatgttgatttaagattaggtaaaaaagcaactagtacagatatattaaacgaacatcctgatagtgttatcatcgctgttggtgccaataatgcttccctaccaattcctggcagtgatttaactcatgtgttagatgcttggaaagttcttaactatgaacaattccctagtggccatgtagcgattattggcggtggtctagtcggagcggaaactgcagaatttttagcacaaatgggcttggacgttactgtcatagaaatgcttgaagaaattgcaaaagaagaatcatcaactgtaaagccagtaatgtttgaagattttgaaaaacatcaagttaaattattgactaaaacaaaggtaattgaaattaaaaacgattgtatcaaagctgctaatggcgatggtgaattaacgattccatgtgattatgttattttagctactggagctaaacctaatccatttgatgtcagtgaattaacagctcacaatattgatattcatcttgttggtgactgcaatgaaaaagctgctgatattaataatgccattactcaaggttatttagcagccaacagtatttaaaactcttattatctagactaaaaagaattaatcataacatttaaatgtttaagattaattcttttttattcttattaactatctactattactagccattctaaaccacgtataattttttcctttgattgatactgataattgataaatattttctggccaagtacatccgccaaagcctccatccccgatagcatgaatatcacatccggtttgtttcattaaaagggcaacctgccgaattgtatcctcatcggcacattcgaccgaactatttaaaaaactcatggctaaagtacctggtttatagcgatgaatatattctactaattctctaatcatatctactgtgattcctgctctagtccctggagctggtaaatcgatacagtcagcaccagcatcaataagtcttttaataacatctttggtatcatatgctgctaaaggatcacctagtaccttttcttcgataccatcttcccacttgccagcaaacaagaaaatatcatctccacatatttcttttactaatttggttgcttcaattacatcttcaatcgatgttccagaacctggattaccacccaatacaataaaatccactcctaaagcaactgcttttaaaatatgttcttttgttgctaacattccagccaatcggtaaagtgttttttcatcagaacgcttttctcccttcttaggacaccctaaataaacaccaattggacaattgcatttttctttaagctctttgatagttaagccgcacaatcctggattattttcaaaattatctaaatctatagtattaagcataaccatatctgcaccaaacgaacaaagcaattcagcatttgtcacacccattaccgtccctgggccagcaaaaattaaatgttgtcccatgataactcgaccttccgatttatagatagattcttttaattctaaaggacccattttgtttatctcactctttgaagcattaatcaatctttttacgttgctcataatttttcctcatttctagattttgttttcttcaagtgttttttcttgattactttttttctctgcttctaaagcctgattgtcacaaatcttaaaaaatgggtaataaattatacatgataacaagcacataattacaatcatgattcctaaactaattcccccacctaaaataaatcccgcaattggacctggaattgtcattacacttaacattaaggcgggaatattcacaacacctgtaaccatcaacaaataaccaataatcataaatacaagtggtgttaaaataaacggaataaacataattggatttaatacgattggaaaaccaaaaataacaggctctacgatattaaacatccccggaacaaaacacacttttccaaacgctttaaaacgttcgcttttagcaaatattgccatatcgcaagtaagcccaaataaacatcctggtccaccaataaactgacaaaaaacaaagaaaaacatataagttgtgactaaggttacaggttctccggccatataattatttaaatttgtaattgctggttccatccaaattaccatcatgacagaaagtacaactgaagtaccatgaattccaacccaccataacagcaataatattaacatactaatcaacatggctggaaaactattacctaaacttactaaaggcgcttgaaccatagtataaataaaattttgaatatttccataagatgttacagcaaatccagaccttaccaataaaaacaaggctgatactaaaaatgctggaacaacagcttcaaatggtttagaaaccatttccggtaccgaatctggtaattttattttccaattatgattaacggcaaaagcaaaaacatatgccccaataatcccacataacatggcagtgaagataccactagcacctaagttatcaactgggataacattttttatcaatgttacagctccatttgtattatcaacattgttataagaaaatggtgtaaccaacaatagtgataataacgaaacaattgctgtttgaaatggattaacattaaacttttcacctaaattataacctaaagcaaaaatgaaatataatgctgttaaattacaaacagcaacccctacagctaaagcatcagatattccagtagacgataaaaaatttgtataccagtctcccaatggtaaaccctgaaataatgaaaatacagctcctcctaataacgctggcatcactttcataaatgcgccacttattgcacttaaaataaaattgttttcaatcttctgtgcaaaaggtataactttattttggataaaatcattcataatttttcctcctcctaactttataactacattttatctagaagtataatcatttaagagtacataaaacttttcattagtccaaaataaaaaccaataaaaaaaataagtgctaaggtttcattttttgaaactttaatacttatccttggttatttaatcttgctaataagctttcaataatcttcattaattcaaatttcttcttaatccctggctgttcgtgtatctctaaaaaacgtttatgagtatacgagctctttaaagatatgatataattattttcgtcatttaaatgtctataaatattcctgatcaaagcattggatatattataatcatagtatttttctaaacttatctgaagatgactataaaaatataacgtatgttcatccatattaatagctaaattgttatcttcttcattaattatataaatatcataacctaatacataaaaatatttcaaatacattttccaaatcaacattgcttctcgctcaccaaataaaataatttgatgacaatgattacatgctataactaaatcatcaagtttatcacgatcatcgagcaaataaataaaatcacaaatcacagcattaaattctcttacaaaagtctttttaaaatccgtgaaatgactagtttttatacttttacaaaatctaatgattgatgatttagatagaccggtatcataaataacatcctctaaagatagttctattagcttttccctttggtttaaaaaatatttaacaagaatttgatccgtattattgatttttgcattcattgatatatctaaaagtatatcgatcattttatcactgctcctgataaataatctcgtgataataaaatttaatcaaatcaaaataatacaacaacaaatactcagtctcaaacatttcattattagataatatattaattacctcaaaaacattgtaatgaaaatttatttttgtttcgcctgaaaaaataataactttattagctttatttcctaaaatcgacactaaattatcatcagataaaaaaagtctaccagtacctgaaatcaatataattaaatcattatcctctatttcaatagaattatcttttaataaagacgacattatcactgtcttccccattgaaatcatatcaatttgaaaattaaaaagaattggagttatcgtaggggaagcaacaataataactctctgactttgagctatttctttaatgatcaactttaatttcattttatcattgaattctaatggataatcaactaaatgtgaaaccgccgcagctaatcgttttttgttaaaaatcttataacctcgatatatttgatctttacgaacatccaattcactttctaatctttctttaaaaatcgaataattagaataaccaaatttttttaaaaactgttttactgttggaactgaaacaaaacagccatcagccacatcttgtaaagtaatacttcctatatgattaatattttctataatatatttggcaatataataatttaaatctttattattagagttattaacaattgataaaaaataagctaagcacataaacatattatcttcctccactcattattaccattatataatattaattaaatttattcatttaaaaattagctttcttgtaccagcaaaaagctccaatcaaatttgcatcattataataatgacacactttgatctctggtggagttaccggaactgggatgcaatcaaataaatcactcacttctttctttaacattgttaataataacggctgagtactaatccctccaccaatactaatattctctaaatctaataacatttgcatattaaaaatatatcttgcaagatttttagtataatcccgtagtatttctaaactagcaatatcattatgattagccttgttaaaaaaggctaatccatcgatcgaatttcgctctaatgcaaatcgtttttcataatttctcgttaaataacctacaccgccaatcaatccaaatgtattttgccaatcaaagtcatgtttagaatcaattaaagaaaacgtagctgctccagcaaaataattacacccacgatataattccccgttaataataattgcgcatccaactccagtacccaatactagtactgccccattactcgtttcttttaatgagcctctatacaattctgctaatgccgcacaattaccatcattttcaatcgaaactggtacgtggcatttactccaaaggatttgtttaatatttttattatcattaaatctataactaccaccattttttattaaacctgtaaagggattcatttccccacaataactaatcgcaattccggataatttcatgtgtatagttttaaataaatccactacccaggtaatcatttcatcatgactttgaaatattttattttctttatttacatcatataactgaaagttttcatcaataattgcatatttaactccggtgccaccaaaatctaaacataaatatttcattatttaatccctcatttcttaacactttaaagttatcatagttaaaaaaaatataaatactatataatttttggttgtgtcaaaaaatgaaacatagaaatctaatatgaactgttagctatgattattgtattgcagcaaataaatctttatctttgttaatatcttcttgaatgacttttttgatatataaagctaacatatatggcattttttcttcaaatgtatctaactggcaatttaataattccttgactttagtcattctataattaatcgtatttcggtgcatatataaatttttggccatcgctacttgactgccatcatgaatcaggtaatagaacaatgtcttttctaattcactatgatgtttttgatcataatctattaaaggctttaataaatgctgatacattcctgataaaatttgtttatcctcgattgaaaataagatttgataaactcccatctcttcaaaaagaatcatcggatatttaaattgttctgccattgcaactgcagctcgagctcgtttataacttaagattacttgtctaaaatctgtcattggcgttccaatacctaagtgaataaatcttgaaggcattcgcttctttgttcttttatacattttatcagtaattttctctaatgaatccggatctaaattatttacaattaatacaaaatatccatcaaaccaaaaaaatgtatatgggctttgtattttttcaaaacataattccaattgaaaagaaactctacgtcgttcaattgcatcaaactgatcagaatcttcaattccaattaaaacaacttgaaaaaaaccatccacatcaaatgcacctaacaattgctgccgaacctcctcaacaacttgaggagttgtaaaaacattctgaaataattttgaaatctgattgtcttctcgttgtgaatataaacagcgcatactaaaatccttaattaaatctgccatgtgtacttcccagggtgtcgttaacagcggaaaatcctgctcattacaatagtcaattatatcttgaggaatttcaaatatatatttacctgtattgataactaatccaacactatggtatttaaccaaacacttgataaaatcaaataacgaatcgtgactttgaaatcctaaacctgttgtaactgccaattcttttccccataattgttgaataattgtcgtatcctcaatcatgtgaacccaactcatcgcatttgaacagccctcacgaccagctaacaattttaaatgatattgctcttgagtttgtactaacgcatcttcaatcgtaaatcccattttactcacttcctttatatttattttaccattatttgtgcatgatgcacaaataaatcttatttttttattatttctgtctctataattattaaaatattaatatataatataattgtattaaaaatagaacatctaggagggacataacatgaacatttcttatggatattacgtactaactgacaactttgatacttgcccaacttgggttcgtgatgaaggatatttcaattgtgaaaacttttcaaaattctttaagttttttaaaaagaaataaataataatgagcattcataacgaatgctctttttcttttaagatttaaattatgctattagataattattttatatttaaagcagcttcataaccttctttaactgctggtaaagcattacctgccttaattgcgccacctactacttgaacatcttcacataattcatttgcaattttttctaacggattataggctttatatccaaatgctaagacaactaagtcagcagaaataacttctttttctccctgttcattaataaatgccactccatcatctaaaatttctgtcacagtacaattagctctggcagttactcctgattcattcataattggtaatagacagctcatattaatgggatccatatcagtcaaaacagctggtttcatttctagaactgttacatgacgatgcgtttgagcaataaatgtggcagtttcacaaccaacttcgccccctccgcaaacaacgatatgctcaacttttgtagcgatttttcctaataacacatcttcagcattgactacattttctttatcgatacctttgattgccggcaccagcggtcttgctccagtagccaaaataatagcatccgggttttcttgttcaatcatctcttttgttactaaagtatttaaatgtacttttacatgcagatcctctaaattctttttaaatacagatattaatgttgttaattctcctttaccaattggataagctgcagatctaaattgaccgccaacttcttcctgagcctcataaacagttacattgtgacctatcattgccgcagtttcagccgcctgcagaccagcaggtccccctccaacaatcattactttttttgctttttctacaatgtccattgaattttcatattcacgtcctacccgtggattaactaagcaagtgacttcttgattaaaaaataatggcatttcacatccttgtagacacccgatacacattttaatattcccatatttttctgcctttgctttattaggtaaatctggatcagtcaatgaaccacgccccattccaataaaatcagctttatccatgttaattaatgtatctgccatttgcggatcgttaattcgattagttacaattactggtaaatcaaccaatttctttacttgtgctgatatctccatattcaatgcatgttccgtaaacattggagcaattactgctctatttccaggtgaagcataagagccattagaaatatgaataccatcaaaacctaattcttcaaaaatcgtacataattcataagtttctgcttcagttcttccaccatgaacatattcattaccagaaagacggacgataattggaaaatcatcaccaacttgttttctcatttctaaataaatttcagcaactattcgtactctattttgtagacaaccaccatagttatcaactcgcttattgacaaatggtgataaaaattccgctaataaataaccatgggcacagtgtagctcaattccatcaaaaccagcttctttaacgcgtttagcagcactaccaaaatcttttactaattgattgatttcagcaactgtgatatctcttggttgttcttgacataagggacattcaattgctgaaggagcaactggcatatgatcttcattagcaattctagtagtttgtctacctggatgatacatttgacaaaagatttttgattcatacttatgaaccatcgttgttaattgtttatttccttcaatcaattcatctttatataaaccgggaattctttgatatcctttaccatattgttgaactgcataatcctcagtaataatcaaaccccagccgcctttagccttttcttcaatatatttcatataacgctcagtaattttaccttcaatcgtacaataatttgtcaccattgccggaactactaaacgattaggaatttttacagttcctatttgataaggggtaaataatttttttaaagccattttaatatcctccaatccttttataactttattttacagtatcaaatgatttgaaggtcaactctaatttattatatgtgatattattcacatattcttttttaatcacatatattttactaaaacaacataaaaaactctcaagctatttgagagttttttataatcggaatttgtatttctaaataccgtttaaaatgatcaccttcatatccacgccccctaataatcccccgtattggtaactgtacatgataacctttatcttgagcatacattactgctgcttcataacactcatgattaaactgtcctaacggtcccatttctattaccgtgcataaacaataatgagccggaataattgtatacttctttttataagaaatacttaatccattaaaatattcctcatcaatagcaaaataccattcatctttatctttattaaaacaaacataactatcaataaaattaatatatttatcatttaataaaaatcgaatattatcttcactagtattaactttatcataatcatcaccaattccatctacaaaatcaaaagcatattttttattaattttctttacccaataatttgataaatttaaatcagctacctccagttgcattgccaactctgtgactcgttttttcaacatgactttataatcaatctctttatttagtcgcctttggaaaatatgtaactgattttgaagcttttctctataattaaaattaataaaattaggaatttcttttattttcattcctaaattctgatactgtaaacattctaataaaatatatatgtcaaaaatactataatagcgatacccattcttttcatctcttataggatcaataattcccattttttcataatatctaatcatttcacttgataaattaaacaatcgtgaaatatcccctattttatactggctattcataatatcagctcctttacaaataattttatcacttaatcttcctatttaaaaaataattttattattagtttttataaatcaactattggtagatttataaattaattaaaactcgttataatcaaaatataaaggagaaatcaatagatggattgtattaaaattggaaaatttattgcgacatgctgtaaagaaaaaacttaacccagattgaaaaactaaatgtaacaaataaagctatatcaaaatggtcgaaattttatcgatgcttcattttatcacgattttcgcaatatcttaggcattactattaacgaattattagctggtgaacatctcaatactcaagataatcaatattgctatgaaatgaatcttcacaatcgtattaacagttacaataacataaatcgaaaaaataaaataattattttcatgatttttagtacattgattttttagtcattacgtatttacaaataaaaactatatggatttttatcatggattcaatacatctaaaaatcattatttagaaaagctaattcttgatctatttcattctttatcagtccctggcaacacacatccaaactttgatgaactttattattggaaaatatttgaacagtctgatagtagtaaaatgtactaatactaagcaatattattttattgaaaatatattctaaacaaaataaaaggtatcacgaattatatgggagagggtccgtgataccttatatgactattatagcatatttaaaaaaataagcatttaatctgattaaactttaattagtttctccaaaagaaatctagatttcaagtattttagtctaaatatattatacttttaatctctattacaaagatttagaaatctttatcaaatcaactaaaacaaatctattctacatttcagttagagcattgttttttataataaatcatttttacaagtcatatacctaactaaccactataccaataattactttaataatatttcaagaaattgatacttaaaatattaatattcaatttcttcaagtgcatttttcaattgattcaaagcttgtcttaaatatgctcttgggcaagcaatgttaattctttgaaacccttttccttcttttccaaacatcgttccactatctagccataatcgagcatgttcaatcaataaatcatttaattctttatctgaaatttgtaatcttctaaaatcaagccaaagcaaataagttccctccgggataatcaactttatcaatggtatgtgttctttcaaatattcatctacaaaccgtgtattttcaaataaatattgctttaaatcttcaagccagcttgaacacgattcataagctgtctggcaagctgctaatccaaacaaattacactggctataaccagtactggcaatagcttttttaaattgtaatctcaatttttcatcggcaataaaaatatttgaaatttgtaatccggccaaattaaaagttttagtaggagccgtacaggttattgtaatattctgtaattctgtctttaatgatgcaaaaacatgatgctgatgccccggataaataaaatcactatggatttcatcactaataattttaacatcatttttaaggcagatttgccctaattttaatagctcatcttttttccaaactcgaccaactggattatgtggcgaacataaaataaacaattttactttttctttcttaatcttctcttcaaaatcatcaaagtctatttcataatgagcgttttttaaaactaaagaatttgttataacacgtcttccgttatcaataattacttctttaaaaggataatatactggtgtttgaataattactccatcacccaatttagtaaatgcccgcactgcttgtgctaaagcaaatacaacaccaggcgtcttaactatccattccttttttatttcgtaattaaattttgaccgataccaactataaatagcttgataataaccatccttactatcactatatccataaataccatgatttaccacatcatataatcgttgttgtatttctggagcaacgataaaatccatatctgccacccataacggtaaaatatcatcaggacgttctctttcactagtgaaatcatactttaaggagtttgtatcagtacggtttattattgaatcaaaattagattttatcattatcaccaaaagcctgcctcaaatcagctaataaatcatcaatattttctattcctactgataatcgcaaaaaattatctgtaattcctaatttagctctaatttctgctggaacatcaccatgggtttgaatcattggataagtaatcaatgactccacacctccaagactttctgcataagtaattaattgtacattttctaaaatcttttttgctaaaaaatgattttcaacactaaaggctatcatgctgccaaagccgcgggcttgatttctattgatttcatatcctggatgctctattaaaccaggataataaactttgctaacccgcggatgccgatttaaccagtttgaaattttcagcgcattttcttgttgtgatttttgtctgattgccagcgtcttgatcccccgaatcaataaataacaatctagtggtgacaagctatttccaactgtctttgaaacttctctaatccttttagctagtttatgatcaccagtcgaaatacttccagcaataatatcattatgcccacttagaaacttagtagcactatgaattacaatatcagcacctaataataatggattttgaaaatatggtgaaaggaaggtattatcaacaattagtaacagcttgtgggcttgacacaaggcactaattttttttaaatcacttatttgcattgttgggttactcggcgtttcaataaaaacagcttttgtttgaggacgaatatactgcttaaaactctttaaattagttgtatcaacataactgaattttaaacctttattttgctgcaaagtaaatagtcgagttgaaccgccatataaatcatttgaacatatcaaatgatcaccactactaaaaagttctagtaccaatgaaattgctgccattccactagaacaagcaactgtatcaactgcaccctctaaattggaaataatctcttctaaataagcccttgttggattactttcacgagagtagttataccctctgctttccccaatcccaggatgagaaaaaattgctgtttggtatattggaattgaaacagcaccataaggatgctgtttcaattctaaatttgcaggatgaatacaacgagtttcaaattcatatttcatacttttctccatttccccacgctaagcgcatggacacaaatatttcttgaaagacattctgattccttctactctactcccccctgctataatgaaagggaggtagtatactacagagcacgagaagtagagtaggtaattctactcgttagaatatcttgtataattataagtcgccgtcatcttttcgagcacaaataattaggactcagagcctggacacttattattgatatattaccaatttggtcatattgctagatgacagtcagtaccacttctcctttctttgaaaggaggttttattttatgaagattgttcgtaaaatatgttgtggcatggatattcataaaaatcttattgtagcggccatcgctgcttctggtgataataatgtcacgacctatattcaaaagcagttttctacttttaactctgatttgttgaatcttttaaactggcttaaatcaaacaactgttttgatgtttgcatggaatctaccagtaagtactggattcctgtctttaatatccttgaatctgaactcaatatttttcttactcatcctaaatacgtgaaggtgattagaagtaagaaaaccgataagaaagattcaaaatggattgctaacatctttaaacaagatcttctcaagtactcttttattccacctaaaaacattagagaacttagaaaaatatcacattatcgcattaaacttgtcaataagcgctcttctgaacgcaatcgttatcaaaactgtatgactgtttctaatattgccttagcttctgtctctactgatcatttaggaaagaattgtaaagctgccatggatgagattctcaaaagtgatattatcactgaagacaatcttaagaaaattctcaagggttctgtttcaaagaaatctgatcaaatttttcaagccattcagaattctcacattgaatctgaccaaagattcaaaatcaactgcactataaaacacatgaataatcttgacgaatatattcaaaactggttagtatttgaaaccacttcttgttcaatgtgctctttcggctatcaagagtgaaaaagaaacatatttcagaatcaagtataatcgtattaagaaacgacgtggtcataagaaagctattatagcgaccgctagaatgattcttatttctatataccatatgacaaaaactggtgaaaacttcaatccatctgattatgaatcattaaaaaatccaaaaccacgcaaccagaagataaccactcatcaagcattagaattattgaaatccatggatattgatataagccaaatcaatttattttctattcaacaaacgagttcatcatgaatttttaattttttaggtcggctttttttataaatttctttcacacttatccccttttaattatagctaggtacataccataaaccattattatttttatctaaatattctttaaattcttttgaacgataagcttcaacaattgctttagcccattttgtatctttatttttttcttttacaactacttgtaacaataaatgttctaaaacatcctcctgtaataacgcactcgaagcatcaattcctgcattataaactatgctgccggtgattacagcataatcaaactcatctaaagcttgaggaatcattgttgaatccatttctgtaaactctatttcataaggatttttaataatatcatcttttgtcacggaactaatatccacatctggatctaaagtaatatactttgctttttgtaataaaacatatgctctagatgtatttgaagcatcgtttggtacagcaatcttagcgccctttttaatttcctctaagcttttatgagtatttgagaaaattcctgcaggtacagttggaattgctgtcaaagctactaaatcaccatcttgtgattcattaaaatttttcatgtaagctgtatgctgctcaacattgacatctatctcgccttcatttaaggctgtatcattttgcaataaatctgaaaattcgatgcatttaaattgataaccttcttttttcaaaattggaataatggcatcttcaaataagactgtatatggccccgctgccttaccatagataattgttgtcttatcttcacttttatcactactactttggcatccggccaaaacaaaaaccatcactaataataaactcaatattctctttttcatttttcttcccctattcatgtgttctaatttttttagataaatgatttcccaatgtttgaattaattgtacaaagataattaaaatgattacggtaacaaacattagagtattattaaaacgctgataaccataagttaatgctaaatcaccaacaccaccgccgccgattgttccagccatagcagttgcccccaataaaccgatcgttccagtagtaagtgctaaaactaacgaagctttcgcctctggtaataaaaaataacgaatgatttccaaagtatttgcccccattgctttagcagcttctaaaattcccggttgaacttctaatatagaactttctatcaaacgagccaaatatggtgcaatataaaatactaatggaacaattgcagcctttgttcctattcttgttccaaccagcacttttgttagcggagcaataaatactaataagattacaaatggcacagatctaacaatatttactaacccactcacaagaaaatgaattgtatgattggctttaattccattttttctagtaaggactaaaagtaagcctagcggtattcctatcaaggttccaaaaaataatgatattcccaacatataaattgtctggcctgccgcttcaagtaatttatcagcaggtatatttaaataattttcaatcataattcaattccaccctctctatcttcacatcttgtttttgaatataatttatcgctcgaataacttcatcctgctcaccttttaactgaattgttaaaattcctaaaatctcttctcctacttcattaactgaagcaaataaaattgttgttgtaattttaaaatgcttattaattttagaaattacatcatgctttgtactttcaccaaaaaaagtaagttttaaaaccggataccgataatctaattcttttaaaagtgtggttggaattacattgctaataactgtttcaacaaatctctttgtcatttcttgttgtggattactaaaaacctctaaagtatcacctttctcaatgattttaccagatttcattaccgctactttattacaaattttcttgattacattcatctcatgagttattaacaaaattgttatcccaagttcacaattaatttttttaagcagcaataaaattgcttctgttgtctgtggatctaaagcactagttgcctcatcacagagtaaaatcttaggttctgtagctaatgctctagcaataccaattctttgtttttgacccccagacagttgtgatacataagtatcacgcttatcttccaattccacaaaagataataattgtttaactcttacttcaatagcttttttatccagttttgaaagaatcaatgggatagcaatgttttgatagactgtttgtgattctaataaattaaactgttgaaaaatcatacctatatcttttcgtaaaatatttaattctcgttcttttaaatctataatattttgattattaatatagattgccccattttcaggacgttccaataaatttaccattcgtaataacgttgatttaccagccccagaataaccgattacaccgtaaatatcacccgcttctacttctagagagacatcttgcaatgctggaacttcaccacttttagttgtaaaagtcttatttacgtgttcaattttaatcattctcatctgcctccaattttaaaagagcctgtttcgccaattggctaagatattttgcagctaacgataaagctgcaggatttaccttaaacttcggatgatgattaggataggtctttccggttccgattttaataaatgttcccctgattttttcaagataaaatgcaaaatcttcgcctcctaaagttgcttcgggtatccctatagcaattttttctgcttgagcaattgctttagcaaaattactccattcctcatcattgacggttgcaggaggccccgctatccactcaatttctgtatcaagatcataggcttggctaatcccataagttatttcctttaatcgttttccaaacagctccctctcctcgctagtcagcgttctaacagtcccttcaattaaggcttgttcaggaataacattccacgtattccctgcttgaagatgtgtaatacttaaaacactactattaaaaggatccatatttcgactaacgatcgtttgtaagctgttaactaatgcagcagctgcaacgattggatctttagccatttgtggatgggctgcatggcttccaaagcccttcaaattaattttaaatcgatcaacagcagctgaaactgtccccgctttaattccaattgttcccacttcaaactgcgaagtactatgaattccaaaaattgcattaacatcatctaaaacccctgtctcaataatttttagagctcctaatgaagactcttcagccggttgaaataataattttactgttccatgtaattgagcagcattttcatttaacaataaagcaacaccataaatcgttgttaaatgaaaatcatgaccacaagcatgcatctttccttcaatctctgacttatagcttaatgtcgtttcctcattaactggtaaagcatcaatatcacttcgtaaagcaattactttaccagggtatccacctctaataactgcaactaatccagtttttaatggtaaatctaaaacttcaatatcatgctcttgtaataatgttttaattcttttagtagtttcatattcctcataagataattccggattacgatgaaaccactcaaattgatattctaattctttttgtaaactgtcgtcttccattctaattccccctttttaataacaaaagtgggatgtttatgtaaacatcccactaccccatttaatatagtattaagaatatttgcatacacgaaaatgtaccctatacttttgtatacagctgcacatacacatatacatcatatctcttctgctttttaacatcatcgttcgctcctcttcttttcctactatatcgataggtttgctatgtaaagtatcttaacacactataaatactccgtcaagcaaaaaaataaatgtcaatatgtttgcataaaaaaaatagctaattagctattcttcgttgatataaataaactcctaaagcagcaccaataataatgatatatccaactatgctccatatatcaggaatttgatttaagaaaataaatcctaatatcgctgcaaataatatttgactataatcatagattgaaatatccttgccagctgcattattatacgccgcagtaattgcaaattgaccaccagctgccattaaccctgcacctagtaagattaaaaactgttctaaactcatcggctgataatcaattattaaatatggtaacacactgagacaagaaaagcatgaaaagaaaaatacaatttttgcaccatttaccccctgcttgcctagcttccgcacacaagtataagctattcctgctcctaatgcccccaaaacaccaataattgaatccacattatttaaaagattaaaagatggtttgattacaaacaagcttccaatgaaagctacgataattgatattttttgtattcttgtcgctttttcttttaaaaacaaagaggaacaaataattacaaaaaatggtgataatttattaagcatcgaagcatcactaactaaaagatgatcaactgcataaaaattacaaagaattcccaacgttccaaagactgagcgtaataaaagcatcggtaaatctttttgtttatatgtaaatccctgtttactttttaataggataaaaaaagcaaataaagcagctaccaaatttctaaaaaaacttttttgaattgatggtaaatcgccagctaattttacaaatacattcattgctgcaaaaaagaaagcggctaaaattatacacatcatccctttacggatattattcataagcacctccagatactataatgattatatctattataaccattacgtcaattaatatgatttacaacaaaaaaggataactttcgttatccaattaattattattgaacagcaaatataagttcagctttacaaactaccttaccatttaccttagcaacagcatcaccaattccaattggtcctttttgtttagttagagtacattccatttctaaaacatcaccaggcgttacttgacctttaaacttacacttattaatgcccccaaagaaagcaattttacctttattttcttctttagaaagaattgcaatacacccaacttgagctaatgcctcaacaatcaatactcctggcataacatgatgctcaggaaaatgaccacaaaaatgcatttcattaacactgacacatttaattccttttgcccactgtccaggctggtaatcagtaattcgatctactaaagcaaaaggataacggtgcggattgatttcttgaatttgattactatttagttccattttcttattctccatatttcttaaagatgatagtcgcattatgaccaccaaatcctaatgaatttgacatagctacattaacatcttgatttctaccagtatttggaacgatatctaaatcacataatggatctggtttttgataattaatcgtagctggaataaatccctcttcgattgctttaacacaaattaccccctcgattcccccggcagcacctaaacaatgccccgtatttcctttcgtcgaagaaatagcaacctttttagcagcttcacctaaagcagatttaattgccattgtttcacctttatcatttaaaggggtactagttccatgtgcattaatataagttacgtcttcagctactaaaccagcatccttgattgcattgatcatcgctttagccccaccagagccatcttctaaaggtgcagtaatatgatgagcatcacaactgacaccatatccgaccatttcacaatagatatgagcgccacgagctttagcatgttctaattcttcaagtacaacaattccagcaccctcacccataacaaatccacaacgttcctcgtcaaaaggaattgacgcccgtttcggatcattattatcacaaagagctttcattgatgaaaagcctccaataccaagtggagtaatactagcttctgccccaccagcaaccataatttcttgataaccatcacggatatttctaaacgcatcaccaatcgcattagttccaccagcgcaagctgtgaccggacaagtacataatccttttgcccctaattcaattgcaatatttcccgctgccaaatttgtaattgacattggcacaaagaatggcgaaacacgatcataacctttttctaaccccttagtatgatctttctcaattgttgcaagccctccaattccgcttgacacaactacaccaaaacggtcagcatcaatctcttcaatctttaaaccagcatccttaaaagcctctttagcagcaattacaccaaattgagtaaagcgatccatttttcgaactgcttttttatctaaataatcagcagcattaaaattttttacttcacctgcaatttttacttttgttaattctttatcatagtttgtgatctcgtcaattccacaaacaccttctttaatacttttccaagtttcttcaacattatgaccaattgcattaattgctccaagccctgttactacaactcttcttctttccattgtctctctccttacattgccattccgccatcaacatggatagtttgaccagtaatgtatctagcatcatcacttgctaaaaatactaccgtattagcgatatcacttacttgtccaaaagttcctaaaggaatttgtttagccatactttctttaatatcttcaggtaaaacatcagtcattgcagtttgaataaaacctggtgctaccgcattcacagtaattccccgactaccaacttcgcgcgctaatgacattgtcattccaataattccagctttacttgctgaataatttacttgaccagcatttcccattaccccaactactgatgacattgaaataatacgaccataacgttgtttcatcataattttagtcgcatgtttcatacaattccatgttccttttaaattaacatcaataactgcatcaaaatcattctctttcattcgcatcaacaatccatctttagtaattccagcattatttacaagaacatcgattcgaccaaattctttaatgatttctttaaacattgtttctgtttcttcaaacgaagcaacattagcttgagctaacataacagtcgcaccgattgcttctaattctgatttagttgcttcagcaatttttttattatcaccaaaattaacataatttacaatgatcttagcaccttcacgagcacaagttaaacagatttctttaccaattccttgggctccaccagttactaaaactactttatcttttaatttcatcttattctccttttaatcccgctaatgttttttctaatgatgcttgatcttcaacttgataagttttaattgtcttatcaatcttacgaataaatccacttaaaactttaccaggaccgatttcaataattgtatcaaccccgttttctaacatataacgaatactatcttcaaaatatactgaagacattacttgcttctctaacatttgagcaatactaactccagactcaagttctttagccgaactattgaatattacaggaacttgcatttcattaaaattaacacttacaaacttttctttaagttcattactagctggtgctaataattctgtatggaaaggtccacttgtatttaaaggaattgcccgacgagcacctttttctaatgctaattcgctagccttagtaactgcctcagcctcaccaccaattactaattgtcctggacaattatagttagcaattgaaacaactcccaaagccctagcttctttaactgcttcatttaataattcgcgatctaagccaataattgcaatcattttgctttcaattcctgctgccgctctttccatcgcttgaccacggaaacgtactaaattaattgctgtttgatcatctaaaacacctgctgcatttaaagctgaatattcaccaagacttaatcctgctacataatctggagcaattccattttcttttaatagcttagttgctactacagcaacagcaaccatacatggttgtgtatttcttgttaaagaaagttcttcaaggggaccttcaaagcataatttctttacatcaatatctaagtcaatgttatcaaaaacatctttagcaatttgatagttatcatagaatgattgacccattccaactacctgactaccttgaccagcatatacaaatccaatcttacccattattttagtcctctctttaattcatccattaattcttttactgaaataattttatcattacgatatccattgcttccactaaatactaatccctcatccaaattacctttagcagcattgatcaatgcaccactaatacaataaggcgtagttttaacatcacaaggaattaagcaattataacagcgttttactggaatcctttcatcttgtttaagtctttttgtcaacttcgtcatgatggctcttcccggcattccaactggtgatttaacaatctcgatatctccttttttagcatttataaatgcttgtttatatttaatatctgcatcacattcctcagtacaaataaaccgtgttgccatttgaacaccatcagcacctaaatctaaatacttttgaatatcctcactatcataaacaccaccagctacaaaaataggaatatccttttgatatttttcaacaaatggttgaacagtctcttttacttctttaaaaatatctactaatttagccgttgttttatttaacacatcttctttatgaaagcctagatgaccaccagcttcacttccttcaatgacaacaaagtctggagctaccttaaatttacgatcccaagttttacaaatcaatttagcggctttaccacttgatacaattggggcaattttaacttttgttccttgaacaaaacttggtaagttcataggtaatccagcacccgaaataattgcatctattttactttttacagctacttcaactaaagctgcatagtcagtaattgcgaccattgcattaattgcaaccatccctttacctttagcaatctctttagctttctttatttcattagctagctcacgtttattagcttctagcggatttttttcaaaatcatcagcacgataaccaggatgagcagttgaaataacacccataccaccatttaaagcaacatttccagccaaatttccaagtgaaataccaactcccatgccaccttgtatgattggtacatcaagagtcatatctccgatatttacctttttcataattaaaactcgctttctaatttcttaaatgccttatcacaatcatcaaataattctttaataattacttttagaggtctaatttcattgatcattccgactacttggccagccattaatgaaccggtatcggcgtcaccttctaaaactgctctacgtagtgaacctaatgtatatttttcaagttccatcatgtcagcaccttctttttcacgcttaacatactctttagccattttattttttattacccgtactggtgttcctgcgattcttccagttactgtagtgcttgtatctttagctttgattacagcttgtttataattttcatgaatcggacactcttcgcttgcaagcagacaagttcctacctgtactccacaagcccctagagcatacgctgccaatacctgttttccactcgcaattcccccagctgctataacaggaacactaactgcttcaactacttgaggtactaatgccattgtagttaattcacctatatgaccacctgcctcagttccttcaacaataattgcatcaacgttatatttttcaaggcgctttgctaaagctacacttggaacaactggcaatactttaattcctgctgctttccatgcagcaacatatttaccaggatttcctgctccagttgttacgaccggcactttttcatcaattactaattgtgccatctcatcagcacaaggattaatcaacatgatattgacaccaaaaggtttatcagttaaattacggcaaatttcaatattcttttttaatgtagcagtgtccattccaccggcaccaattaaaccaagtgcgccagcattagatacactagctgcaaattcaccggtagcgatatttgccattcctccttgaatcaaaggatattcaatatttaataatttatttaatttcatcttctaactccattccattaatgttgcgccccaagtaagaccaccaccaaaaccaacacaaataattttgtcacctggtcttaacattcctttttcattcatttcacctaaagccaaaggaatgctagctgctgatgtattcccatattcttgcaaattcatataaaacttatcttctgaagacttcatcttcttatatacatttttaataattcgataatttgcttgatgacagacaacgtaatcaatctcatcaagagttaaatttgttttttctaagattgcattaatactttcaggaattacttttattgcaaacttaaacacttcctgcccagccatcgttaaataatgatcctgattagatttactgattgccggggcctttaatgcttctaaatttcccgctgaattactgtagctagcaaaaataccatcaccatttccaactacaagggctccagccccatcaccaaacaaaacacaagtattgcgatctttgaaatccattattttggaaatttcttcacttccaatgactaaagcatatttatcttccatgttttgtaataatgcctgggctaccgttaaggcatacacaaagccgctacaagcagcatttaaatcaaagcacattacttcttgatcattcaaacctaatctttcttgaatcaaacaagcagtgctgggagtaaaataatcgggtgtcattgttgcacagataatcaatccaatcttacttttatctattttttcaactgcctttaaagctgcttgatacccaagttctacgcaactttcattttcagcaatatgtcttctttttatcccggttctagagacgatccactcatctgatgtttcaaccactttttcaagatcgaaattatcaagtactttttgtggtgcataataaccagttgataatatttttaatccactcatataatctcctaatatttttctttgatatcttcaaagaaatacaataactgttgtaatgatttaatcaataactcatcatcaagaacatgactatcttcacagacacgacttaccatctcttcatgaaagtctcgatgtactttgcaaacacgattacctttagctgtcagctctacacgaataatgcgtcgatcattatcatctttacgacgttttacgtatcccttagcttcgagcttttttattgctgtcgtaattgttccattagttaaagtcgcctgagaagcaattgttgacatcgtgggatttgaaagcgaactgattgcatcgataatatgcagttctgataaacttaaatcttccactccatgtcctaccatatattgggtttcaatatccaaaatttgattaaacagtcttacaaacagttgattaattaattctcgatttaaaatatcgcgattagtcattcgtaattcgacccatttctctaaatttattgtaacgtttatttactaatgatgtttttgataatttcatcaattcttcaagagtatttcgaagatagattcttaaacgtttgtatacatattcgcggttctttgtaattccacctcgaggttctttgatgatcttatcaatgatcttcatttcatataaatcatttgcagtcaatttcattagctctgcagcttcatgaactcttgaaccatctttatctttccataagattgatgcaaagccttctggtgataaaaccgaataaacactattttcaagcattaccatacgatctccaacacttagtgccaaagctccaccactgccgccttcaccgattacaatcacaataataggcaccgtcagctgtgacatttccattagattacgcgcaattgcttcaccgattccatgtttttcagcttttaaacccggataagcacctggtgtatctacaaatgtaacaattggtcgattaaatttttccgcctgtttcatcaaacgcatcgctttacgatacccttctggtgaagacattccaaaattacagtgtagattttcctctaaagttcgtccttttaaatgtccaattacagtacagggaatattattaaacattgctaatccaccgacaattgaaccatcatctttgtaaagacggtccccatgtaattcaataaaatcatcaaataaattatcaatatattcacggacattaggacggtcagctttacgagcaagataaactcgatcataagcactaatatcctgatatgcttcagcttcaatttttgcttttgtattttctaaatcttgaatttgtaaagtgtggtcaatctcttggtcatcctttaattttaataactctaattctatttctttaatttttatttctttttcttgcagcgacattattgcgcccccctgctatgcatttttaataatttgataatcgtttcacgcattttagaacgttctacgatcatatcaataaatccttgatcttgcataaactcggttctttgaaaaccttcgggtaatttttgtttaattgttgattcaattactcttggtcccgcaaatccgattaatgctttaggttccccaataataatgtccccaagcatggcaaaagaagcagtaactccaccagtagtaggatgagtaatatacgaaatatataacaatccggcttcatgatgtttggctagagcagcactagttttagccatttgcattagtgaaataattccctcttgcattctagctcccccagaagttgtaaaaataatgattggacatttgcgttttgtcgcatgttcaattgctctagtaatcttttctccgacagcacctgacatactccccattaaaaaacgagaatccatcacacaaacaacaacttttcttccatcaattcttcctgtagcacaaacaaccgcttcgtcaagatttgttgtttcttctaattttactaatttttctttataaccaggaaacattaatggatcatttgatttaatacttttatataattctttatattttcccccatcatacaaaagatttaatcgcgtgtatgcccgcatctttaaatgtgctccacatttaggacaaacataataactttctttcaaatcttcacttaaaatcgactctccgcaagaatcacactttgtatataaaccatcgggtacatcaattctttttttatcttgcattttattacgaatagatttaaataaattcaatttttcttttcgtgccttaaataactcttccatttattatcccaccaacttatctaagttattttcaataaaacttgtatcaaaatttccttttacatactctcccgtatgtaaaatcaaatattgtaattcttggttagtatcaattccgtcaataactaattcagctaaaactctacgcattcttctaattgcttctaagcgattagaaccatgaacaataactttagcaatcatggaatcataatgtgatgaaactttatacccctgatataaagttgtatcaattctcacccctaaacctcctggtaaatgaacactattaacagttcccggacacggtctgaatccctcacgtggattttcagcattgattcggcattcaatcgcatgtccatttaaatgaatatcactttgtttataagttaatttttgatttgcagcaattctaatctgttccctaattaaatctaccccggtcaccatttcagtaattggatgctcaacttgaattcgagtattcatttcaataaaataataatttccatcttgatctaaaacatattcaatcgttcctgcattgcgataacctgctcctttagccgctttaactgcatcttcccccattttttgtcggagcagcggtgttaaggctttacttggtgcctcttcaatcatcttctgattgcgtcgttgaatagaacaatcgcgttctcctaaatgaataacatttccataattatcggctaaaatttgaaattcaatatgtttaggatttaaaattaatttttctaaatacatatcatcatcaccaaaacatgctttagcttctgctttagcagttaaataagcatcatcaaattcttcttcgctaaaggcttttcgcattccacgaccaccaccacctgctgaggctttaattaaaactggataaccaatttgatttgcaacttctttagcttcttgtaaagtatttacacttccatcactcccaggaactaccggcacacctgcttcaatcattttttgacgggccatacttttatttcccatcatatcaataacatcgccactaggcccaataaaagttattccacattcttctactaaacgagcaaaagttgagttttctgataaaaagccaaatcctggatgaattgcatcacaacctagtgcagtcgctacacttaaaatatttttcatatttaaataactatccgctgccttggcaggacctatacataccgcatgatcagccaattgcacatgcaatgaagtactatcaacatttgaataaacagcaactgcttcaattcctaattcttggcatgttcgaattattcttaccgcgatttcgccacggttggcaattaaaattcgcttaaacatcttaactacccttcaatgatcattaacacttgatcaaattcaactaaatcttcagtatttgccatgattgatgttactgttccatcaattggagctttaatttcattcattaccttcattgcttcaacaatacacaacacctgtcctgcttttactttagtgcctacttctacatacggtttagcagttggtgaactagatgcataataaaccccaacaattggtgatttaaccggtgttccggtgattgctggttcattagctgctacttgctccactggcgctaaagtaggcgttggagcagaaactaccggtgtacttacaacatttaccggtgctactggcgttttttctaattctaatttaatatcatctatctctactttcattttaaaaacttctgagttttcaaattcatttataagttgctttactaaatctattttcataaatactctcctttattttgaatatcaaagtaattttttaaaaaaattattacccagctattctgggtaataaaaatcagcatttattatgcattttctttgatataatctacgatatcttgaactgttttaatttcagctgctttatcatcagggatttcaatatcaaattcttcttcaactgccatgattaattcaactgcatctaatgaatctgcatctaagtcttcttttaagttagcttctaaagttactgcatcttcatcacagcttaaagaatcaacaattatttcttttactttttcaaattccacgttatattcctcctcgtgtatattacggtcacattataacaaaatcaaaacatttgtaaatagtttgatgttcaaaacttttatcgaagactgtcgaattaacccaaaacctagtaaaatcaaggtgtttcaagtaatattttttttcgttttttttatgttttaatcgtcatttttttatgttatagtcttttttaggagggcacaattaatgaaaatacccgaaataaaagctaagacaatcattcaaaacaaagccgataaaaatcatttttggtttggttttgactacaacatgaatctctaccaaggatgtcatcacggttgtatttattgtgacagtcgtagtgattgttatcaaatctcaaactttgatcaaattaaagtaaaacataacgtactcaccctactttctaaagaactttgttctaaaaaaagaaaaggggtgattgcaattggagccatgtctgatccctataatcattatgaacaacaattaaagataactcatcaagctttaaaaataataaagcaaaccaattttggtgtaatgataacgactaaaagtcatacgctcattaacgatcttgaactcataaaacaaattaatgataaacaatctgtcctaatttgtatgaccattacttgtggtgatgattcattagcaaaattgatcgaaccaaatgtttcaatttcatcaaaacgatttgaaacaattaaacaattacgccaacacaatatttatgctggggttttaatgacaccgattttgccatttattaacgatacccctgaaaatattcgagaaatcatctatcgcgcacatttagctaatgccagctttgtttatcctatgtttggtgtgactttacgagatcatcaacgtgattatttctatacgcagctagatcatttatttcccggctgtaaggaacgctatataaaacaattcggtaatacttatttatgcaacagcccacgactttatgaattaaaaaatatatttattgaagaatgtcacaaatataatatcatttataagatggaagatattataaatggttataaacaaactgcatcatcggaacaattgagtttattttaaaaaatagtccagaagatcttctggactatttagtatgttcatatgtataattcattaccacttaatagataatactcatctttttttagtatcaatgttttgatagtctaaacgtttatacaaattatcaatatattggtgttttaaaacctcttgaaaactatatttaaaattcaaatcaaatacaaatactaaatgtggtaaccaaatatctaaatcattttgccgacagctgcttaaaatcatttcatgattcaaaaatgactggtacactgctctcactaatcaattgtttttctatttcttcttttcccttataataaattgtttctagcgggagagtagattaatttccagcttatcgattttgttagcatcacggataatctttgcatgcagtaattcatgagtatctaatcccattcaaatcacatatttattgtgctttttgattgctttataaataatttgctcattattataaatatcactaaatttttcaatcaacctatcttaaaataataaagagacatcgaaatcatattcactgacataagtattaaattctttatatacatcctctatttttatcattaacttacctcaaaaaagtgatcttaattattaagctcactcttttcttttaaatattcattagcatggttcattatatttaacatcttcttaaaagtatcactattttgataattaagtcgtttaactaattttgtaatataatcttgttgataaacataattacaactatactgataattcaaatcaaatatcaaggccaaaaaggatacccagcgatccaagtcagttttacgagtggtactaagaattgattcactattcataaatgtttcatatatcgattcagtaatgatgtcattctctaaaatctcttgtccagcatccaaaaatgcttcgaacgtttctaacaaacctgttttaaagatatcgattttgtcagcatcacgaattattttacagtggagcatctcatgttcacttaatccctcagcaattttatatttattatgattaaaaatagctttgtagatcagtggataatctttttgatcaatatcaaatttactaattaaattatcatcaaataaaatttgaacacctaataatgcatgatcaattgttttactatcaataaaacaattataacgttttaattgttcaaatctcccaatatcatgtaataatccaattaatgatgctaagtctatttcatcttgatctaacccgagactcactgcaacattttttgaggcctccataacacgataagtatgttctatctttaaggcaactttaggattatctttatcataattcgctacatattcatcaaacaatcttttagcattttttaaatctatcatctaaccacctccagctatcattatatgctctttaacagcatttctctactattttctaaatagtaatttctatttttatatggttatgttatattaataaacaaggatgtgattagatgaaattaagattaactactactaatgatttaaccgctgtcatgacaattatcaatcaagctaaagtatattttaaagagcaaggaatcaaccaatggcaagatggttatcctaatgaattaactattattaatgatattagccgccatgaagcttatgtgcttgaagataacggagaaatagtcgcaactgcgatgatctctaaagagcttgaacctagttataattatatagaagggaaatggcttcaagataatgcatacattgtagttcatcgcatcgcgatacgaaatgatcaaaaaggtaaaggcttggcaaaaatcattattgatgaaggactaaaactttatcctaaaaaaccaagtatccgtatggatactcatgatgataatctttcaatgcagcgtttcttgattaaatatggatttgaatattgtggcactatttatttagaaaataaagaaactcgacgagcatatgaaaaaattctttaacctgcattacaaagtgcaggttttattgttcaataaaatcaatcaatacttgattaaaacgttctcgttcatcataaaaaatcccatgtccactatattcaaacttgcataaaatcgaatcttctatacattcatgcatgattaaagcaaacgaaaaaggacaaattttatcaagcactttatgcatgatcaaagtagtgaccttaatctcaaacaaatcttgatacacatcttcatctcgtaaagaaattgctgtttggatcgttcctattcctgatccctttaaacaaattgatgtaaaccagttcataaattcactgccatgatttaatgcaaaaacattttgtccgaaatcatgaaccattttaggtcgattagtataacactgctcaatcagttgatttaccgcatcgatactttgtccttcgggattatgaattgtacgagtatatgaaggcactgcagcaccagccaaaactagtttacttactcgttcttttccaaatttactcatataacgaacacaaatcgccccacccattgaaaatcctactaatgtcacattatggacatttaaggttattaaaacactatgcagatctatcgctaattggtcataatcatagcccctgcccataacttgtgacattcctaatccacgaatatcataactaatgatgcggtatcgacaatcgtttaaaatatctttttgatattcatacatttcttggcaaattggccagccatgcactaaaactactgtcttttgatgagctggattaatatcctctaccgctaatttggcattatctgatgattttagataaaacacataatcccccctcatcatattctatgtaagctcaataatattataaccttattttaattattaatttttgtataccagcagtcgattaagttaatcaatatttactatgattcgctatcattaattttgataaattatattgtgatattggagtgagaatattaatatatatcatcagtgcaattattatctatgggtatagttgttattattttaccagtactatcgctaatcttttaattgcattaatagccttatgagtatttggtatatttatcatcggattaattttcttaaggaatgttcgcataaaaaataattatagtggtctcttgtaagttgaaacattccttattctcagcttgtttttaaatgattttaatagcttgagcgactataaccccattattctttttactaacagaaatattactatgacatataatatttctgttagtaacttgataattacaataattttgactattatcttagttattttcaatatttatatctttaagtgtaaaaattatttcatttgtattcatatcttattgtattcagcatatttttatatgaggtgaagaacatggatactaaagtaaataagccttaccccgaaataaaagtaactgtgccaaatgaaacttatggtttaatgatccttgataatgtcggtgggatgaattctgaaacatctgcaatttgtcaatatatttataaccatagtattgctggcgaagattttttagaactaaaaaaaacatttttaaatatttctatggtcgagatgcatcatttagacatcttcatgacccttgccttagaattaggtttagacccccgctggtggagctgtctaaatgatcaatgtacttattggtcaccatcatatttaaattatcctaattcactagaggaagtactaaaaacagcaatagacgctgaatatcaggcaattgataagtatatgtatcaagctagcgtcatcaaagatccctatattgttgcgattttaaatcgaatcattgaagatgaagaactgcatatcaaggttttaaaagaatgggaaactaaattagttagataatctaactaattagttttccttcttttaataattgcaataattgtaaattttgcgccgcactacctacataattagtaattccattaagttttgctaaatgttgacgattttcaaaacttgtatcaacattaatttgctgaagggctccaactaaactatctccaacataattaggatttgataaatagcttaccctaccttcaattacctggtcattgacccagccttgatcattacctattaaataaggatttcgagtattttttacaattcgagttatctttccaacattacgatatggccgtaacggattagaagattcactagttaaaaagacatagctaaatcttactgtatcacctaatttatattgttccactgctgtatcaatatcaaaattattcttacctgcacgtttaataatagctggaaaatcagcataacaataattcatatcaacaattgttggtaccccttgaacccatccagtcgaactatattgccacatatcatacggtttatcataatttaactcagcagcatagttagcaacccaccgtgtataattatcaaaaatcggatccgttaatttagtgttccaccagtatagtgaagcatacatcccaacataatatccattggcttctaattcatcagcaaatgttttagcgatatttgcaatcacatcatttgattgctttccagtcgtattattatcttctaaatcataatacactggatatgccatcttatagtttttcactagacgtaaaacatgttgtgcttcccctctagcatcactactatttttagcatatgaatataagtaaacaccaaacggtattcctaatcgtgtacactcgtctgcatttcttttaaacaaacgatcatcttgatctgttcgatcttgaccaaaaccacatctaagaattgcaaaatcaactcgatcttgaacaatttcccaatcaattaccccctgatattgtgagacatcaattccatgtgtcgtcattcttccacctccattaataatatatgagcaattgtcaaaaatgtgtgactttctagacttttttatcattttaatgcgaaacaatgaatattatgttataatcacattggtatggattaaatacgccatctttaaaactgaatataaaactaaataatatatataaattggaggtcgatgaaatgaaaaaagtattcgtcactgccttaggagtctgtacaatgctttcattagtaactattcccactcctgttcaggcaactgatttttccgggcaagaagataagtacatgaaattatgctcatcttcaaatctttcaactaataacttgaacacttgtaaagaattcaatacatacttgaaaaataaaaataaagaattgaaatctcaagtaagtgattcaaaaagcaaagtatctgatactcaaaatagtttgaatagtatctcaagtgaaattagtgcattaaatgatcaaattgctgaaaaacaaaaagaaattgaatatttacaaacttcaatttcaaatttagaagcaagtatagctaaaaaagaagaagaagtaaaagaacgtatgtattcaatgcaatcatacaataacaataattcatatattgactttatcttcggggcttctagcttcactgatatgtttgcccgaattgacagcgttaatgaaataacatcgtatgatgatgaattagttgcacaactagctgatgaaaaagaacaagtagaaacacaaaaagctacggttgttactgccaaagctaatattgaaagtcaaaaatcatcaaagcaggcactacaacaagaatatcaagctctatttgaaaaacaaaacgctgatttgattgcgcaagaaaaagcagctgctcaagcggccgattcaagtcaaaaaatcactgataatatcgctgcactattagctgctactgaaaaatcacaagtttctggcggaagcgttgtttctggtgattctgcagttggaaacgcaattgcacaaaaggctttaactcgcgttggttatatgtatgtatggggtggatgtcacagcatgtctgaaatcgctaatccaaaccacactgcatttgactgctcaggtttagtcaactgggcttattatcaatcaggtgtcaacattggttctaataataccaaatcgctagctagtaaaggtgtatctgtttctcgtaataacatgcaggccggagatatcatcttatttagcagtaatggaagtaccagcggaattcaccatgtcggtatttatatcggtggtggtaacatggttcatgctccacaaacaggtaaacctgttcaagtagcggatcttggttattcatattggcaaaaagaatggtatgacgttcgtagattgtattaatacaattagatgagcaagcttgctcatcttttttatcacatatatatgaaattcataaattaatttcattatttccataacaaatgtgatattttttagaaaattagctttatatccttagaaaaaatctaaattagtatttacttattaagaaaaatataggataattactatgtatcgaggtgattgtatgaaaataaaaaaagttatatctacagctttaacgctgacaatagtaacaagtgcatgttattatgcagcccctgtggcagccgatgaatttgatggtaatgaaagtaaatatatgacattatgctcatcttcaaatttatctagtagtaacaaatcaacttgtgaagcattcaacaagtatcttaaaactaaaaattctgaattaactaaaaaattggccgaacaaaaagaggctgctagtgacactaaaacaacactagaaagcgttcaaaaacaattagatgaagttaataaacaaatcagcgataaagaagctgaaattgagtatttaaatacaactattgccaatcttcaagcaagtattgaaaagaatactcaattattaaaagatcgtatgtatgcaatgcaatcttatgcaaatgaaaatacatatattaactttatttttggtgcaagcaacttcacggaaatgttctcaagaatcgacggttataacgaacttacacaaagtgataaagagttgattgaagaacttaataaacaaagaaaagaagttgaacaacaacaaactattttagaagaagctaaagccactttagttattcagcaagaagaacaaaaaacattaaaaacaaaatatacagctttgttagaggaacaaaacaaatcaattgcatctactcaaaacacgatttatgattatggtgaaatgactgaaaccctggatgctgcaattaaaaaatttaatgaagaagcatatgaaactccaactcctacaccaccgcctccaaaacctgataatggtggaaacaataataattccggtggtaacaacaacaataataacaacaacaataataacaatagcgattctggaaataacaacaatggcggaaacaataataatgattctagcacatcagataatcttggtgaaaaaatctatgctgctgcttatgctaaattaggatcgcgttattggtggggagctcaaggtcccacatactttgactgttctggtttagtatattggtcattaaaacaagcaggtgttagtggtggtcgagatactgcttctggttactccagaaaatggtcagctgtaagttttgcaaactctaaaactggtgatttagtatgttttggtagtccagcttatcatattggaatcattgttgtaaacagcgatggttccagatcaatggttcatgccggtggtggtgattcatcaacacacggtgataatccaaaagcttatgttaaagtatcttcaattgaaccaggatcatattactatagtagaataagtacaattagacgtgttagtaaataatagatattttaaaggacaaattttgtagttcactacaatacttgtccttttttattttaggcgataattatccaaataatatatgagcgttatgttatatttatatcctatttaaaatttactatgctataattaaagttagaaaacaaaggagggaaatgagcatgaaagcaaagataatatccctctttcattacttattagtctttttattaataatttttaataccagctgtcaagctaaatcaataaatattgttgatacaaataataatgatcagattgaactaaatttttatggatataaaacggaagcaattaatgttgttgcaatcgaagaaattttacaagcttatatggataaaaatcccaatattaccattacctatgaaagtgtgaaaggaactgagtattatgagatactaaaaaaacgtttggcctctaataactatgatgacatttttatgatcgatgaagataatttacagcaattaactaattataattattttgaagatttatcaaagctaaaaacaataaaaaactttaacacaaactcattggaacaaatggtgcaaccagataatacgatcccctatattccaacttctatttcagcatttggattatattgcaatcttgatttactagaaaaacatcatcagtcagttcctaaaaataatcaagaatttatggctgtttgtcaatattttattgagcaaggaattactccgatcatcgctaataatgatatttctctaaaaacaattgctcttgctaaaggtctttatcccatctatcaatcacctgaaaaggatagaataatcgcttcactaaatcaagatcctagcattctttgtaattatcttaaagaaggatatcaatatgttaaacagttaatcgacaataaattcattgatgcagccacaactttaaaaacagaaaaaactgcagacgatctaatacagtttgaagaaaataaaaacccttttatgttaactggtgcctgggcctctgttcgagttgaaaaaagttcaccagatttaaattttaaagtttacccttatccaattttagacgatggagcaattctagtttcaaatattgatacccgtgtatgtattaatgctaaaggtccacatattactgaagcaaaaaaatttattgaatatttaagtcaagaagatgtgatgtggaaatttgtaaatagtcagtcctcttttagtcctctgaaagaacaacgtattgctgatgatcctaagattcaagaattaagcccttatttaacctcagagaaaacaattctaggtagtgattcaaatataaatcttcccctttggtcacttacccatgaaggaatcacccaattattaacaggaaacagtattgatagtgcattagaaataatcaaaaattatgaacagtgaggatgattccaatgaaaaataaaaaaatatcgttaatgattgtcgggggaattagtgctgtgatttttgttgttttttccatgttcatttatgttaattatgttcaagattctctttgggataagtcaatcaatgatattttagaaacaacctctcaggaggaaaaagcctttaatgtctatatgactaaagaaatgactaactcccaaaacatccttactaatattgcctatctacaaactaagattccgcagtatctccagcatctatctaatcgtgaagaagctaaatatttatatatcgactataccaatgactgctactatgatgaaaatggtaattatccgttaggtgatgaacagttgtttcagcaaataaaagctgataataattcacaaggatttttagagccctatcttaattcaaaaacaggtattaagacttttgcaacttatgtaaaaacaagcgatagtcaaagtgtcattgtcaaagaaactcaattaagttttattattgaaaacttctcactttcgttttataacgatttaggtttttcatatattgttaaagataatggtgaaattttaattcgttccaaacatcgtaactcaaatcgtacttttaaaaacttatttgatttaatcgatctgtctggtaatgatgcaaaaaccattgaatcatttaaagcatctttatctaaaagagataaaggtgttgccttatttaattatcaagatagttccaatgtattttgctatgttccattacaacaaaacaatcactggtttattatttcaattattcctaataatgtaatcatgaagcaggccaataacattattatttcctccataattctatgtagtggtattgctggtgcaatcagctgtgttgttttgctatatatccgtgataaccgtaaacacaaaagaatgttagagaacttagctttttatgatcatttgaccatgctctataattatcaaaagtttaaaacagagggggaaaaattatttttggaacgtaatcatacccttcttgcagttctgtatttagatattaatgactttaaaataattaatgaattatatggttataaatatggtgataagatcttaacgcagctggcaaatattttaaaaaaattggtcatagccccaggacttacgtgccgagtaaatgccgataattttttaatcatgcagtcatatcatgatagaaccgaactggaaaacttatgccaagaaatcaatcaaaaattttgtaatcttttagaatcacttgataataaaaataatactatagttaaaattggtatatgctgctatgaagatgatcaaacaatctcaggtattgatggtctaattgactgtagtcacctcgctttaaatgcatatatacctggccaaaccaataactattacttctataattctaaaatgcatgatcaaatgattagaaaagtagagattgaaaataacatggagtccgctttactgaataacgaatttacattctatctacaaccaaagtatgcgccaaatggacaagtcatgttaggagctgaagctctagttcgttggcttgagccatcaggaaatctcattatgcctggtgaattcattccaatctttgaacaaaatggctttattcttaaaatggatgaatatatatttgaaagtgtttgtaagtttctctatcaacgaattatcgaaaacctgccaaatgttcctatatcgattaatatttctagattacatctttatcaagatgactttattgaacgctacagtaaaataaaaaataaatatagtttacctgataaattagttgaattagaaataaccgaaaacattttacttgataatattgaaagaattagaaacattatcattgaactacaaaataatggctttacttgttcaatcgacgattttggttcaggttactcatcattaaattctttaaaagacttaccatttgaagtcataaaattagaccggcttttcttaatcaacagttatgatattcaaagaagtcaagaaatcatcaaagctattgttgaaatggctaaaactattaatattaaaacagttgctgaaggtgtcgaaaccccaagccaattggaatttttaaaaatgattgattgtgatatgatccaaggatatatcttttctaagccacgaccaatcaaagaatttgaacaactgcttataaatcaagaaaaataactttttaattagattcctatttttagagttgcagactcgaaagtaggaattttttaacattttcttagatatgcacccaaaaacagcgtattatctttatttattgagttagcaatatctcgctaaatatcatataacaattattctttccatagaaacattttttcaaaaaacgatcaataatactctttatctaataatattctaaaatttgatagtacaaagaaaacttgttttcaaaattattatcccttcattataattataaaaggtttactacatcataatatcatcaaatcaatctaataaaatattcgttattcatatcaataccatctttttcatcaaactgtatacttttctataactataacgtcaataatttttaatatttatattaaatagtctttaaaattagcagcttttaaagaccagatattttttattttaattgaaaacgataacattgatattagagatttaataatttttattttagtgctataatctacaagaaaagagggatagtgtgaagtatgtacatcaatttttaattattatgacaatctcatttattggggaattgttgggattgttattgccattgccaataccggcaagcgtttatggtttagcaataatgctaatttgtttatttactagagtaattaaattaaatcaaatcgaggaagtagctgattggctgatcttaatcatgcccgttttatttgttccttctgctgttagtctaatcaacgttggtaatgctattattaaagatctcttagttattggaattgtcactttaattagtaccatcgttgttatgatcgttacaggaaaagttgcacaagtaatcattgaacgaaaggaggataatgataatggatagttttttgcttgaaacagtatattttgggattgttatcagtctattatcatattggattgcagttcaaataagaaaattattgccttacccaatttttaatcctttattgatcagtgctgttatttcaattggtatattaatcatttttgatattgattttgatacatataataagggagctcaattcattacttttttattgaccccagctactgtttgtttggcggtaccactttataaacaagtgcaaatattaattaaacatttagatgctattttaatcagtttatttagtggttgtcttgccggaattgtttccatttttataatgtgtttaattatgaaagccgatcctgtaatttattattcacttttaccaaaatcaattacaacagcaatcgcaattggtgtttctgataaactaggcggtaattcaaccattacagttggaattgttattattactggtatccttggtgctatcattgctaaaagtatttgtaaattatttaaaattaagcatcctgttgcaatcggtttagcccttggtaatagtgcccatgcgattggaacatcaaaagctttagaatttggagaaattgaaggagctatgagtagtttatcaattgttattgctggattattaactgtaatcattgcaccattaatggcaaatttattataaaaaataaccctttattcaaataaaatgatatgtactggataatccatatcaaaacgagtaaagggatttctttttattatatctgactatatgtctctggactttctaagcgctcaaccaaacgccgtaatgattgctcaaaccgatcagtaaatggttcatcaaaataaagataaccattttcatagtcctcatctacagctgtttcaacaactacagtaagactttgataaacgctactaagattttcttttatatattttaattcctgatgattgtattcttcaataaaaatataatgatcacaaacctctaatgcatatttaagttcatcattaaaattatctttaataatttcatgattaagaattccaacttgaaacccacgaatctctaattctaaagcaaattcatttatccacattatgttacttgtattagttaataaagtaatatttttttctttattttttaaagttagattttttaaatcaaaaaaaacttgaagtaaatgccgaaccaaattacattcagtaattatacttgtatgttcagctgtatatttctttattttagggtgtgcacgtaaatcaattgcttttaaggcttgggaaagttcaaaatatcgatcgactaagtcctgttttgtaatattgttagtaatgctattgacgctaaaaaaatgataattagtatatggtaaaatatcagtatcataaccaaaagccacttttgctttaacccctttttcatcccagccaataaaccttccaattcgtcttgctgcttgtcctgagacgattttaacatatccaaatttagccataattaatactcctctttctttataatttcttagcagcattaaatattcattttaataactattttcaatgccccttattcgcttatataaaaattcatttgttggtacttttagtttatgctttgatgccaaagaaattactgttccagcaaacatttcaacttcactgtaacgacgtacttttgcatcttgagccattgatggtaaacccagaggagccaaagtcctaattatctcaatataatgcttcaaatccgtttcagttagatcaactccctcgtaatgtgacaactcaataatttccttcattgctgcaatcaaggtatcatttgcttcccctggcattaaagcaccactataattggtattatatgccatacaagtctgatttatcccaacattcaacatgaatttagcccacatactatgtaaaatatcgcctttaacttcataattaatttttgcttgatcgaagaagctagtaagcttatccaacttatctttttgcttgaaatcagtgattcccaataagagctgtccttctttagtgtactttagagatgttccaaacttcattgcatccattccctgagcaaccgcataaattactttttctctcccatagtattcactaataaccttttcactgtcaatcccatttaaaacagaaattattattgtatttttatcaacatattttttaatttcctttattgcttcctctaaagcagtcccttttactgctatgattattaaatcaaatggaacggcattaaaatactcaactaaattaaataaaactttctcaccatttattgtaaatacagtttcctgatatgcttttttccttttttcatcaactataaatgtcactgcttctctagtaatgtttttgcaataaaatctccatataacattcctaaagcacccatcccaataattccaactcgtttgatcacaataatatcctccataagaaaaaagctgatcaatgaccagcttttgcatcaagtttcaattaattatttagataattcagcgaaatatttgattgttctaaccatgttagaagtatatgaattttcattatcataccaagcaactgtttgaacttcagtagttccgttgtccattggtttaaccatagtttgagttgcatcaaataatgaaccatagttaattccaataatatcagaagaaactaattgttcttcagtatatccaaatgatggagtagctgctgctttcatagctgcatttacttcttcaactgtaacttcaccttcaacaactgaagttaagattgtagttgatccagtaggaacaggtacacgttgagcagaaccaattaattttccgtttaattcagggataactaatccgatagcttttgctgcaccagttgagttaggtacgatatttactgcagctgcacgagctcttcttaagtcaccttttctatgaggtccgtctaataccatttggtcacctgtgtaagcatgtactgttaacatgataccagatttaattttagctaagttatttaaagcgttagccattggtgctaaacagttagttgtacaagatgctgcagagatgattgtatcatcagcagttaagatattttcgtttactccgaatacaactgttggtaagtcatttcctgctggtgcagagataacaacttttttagctcctgcatcaatatgagcttgagatttagctttagatacatagaaaccagtacattctaatactacatctacaccgatttcaccccaaggtaatttagaagcatctgcttcactatagattttaatttcttttccatcaacagtgattgaattttcaccagcttcaactttatcagctaatgcatatctaccttgtgctgaatcatattttaataaatgtgctaacattttaggatcagttaaatcgttgattgctacaacttcatatccttcagcaccaaacatttgtctgaatgcaagacgtccgatacgtccaaatccgttaattgctacttttactgccattctttatattcctccttgaatgttctttatgctcatattatattccagaaaggcaagaaaagcaactaatgtaacgggtttcattgaaaaaaattaaatatttcacaaaagattcataaatttaactttaatggaacaaaatctaacattattcttttataatataaatttagtgacttttacaagcctagttttaccgcaatctttcttgccttttataggcttaaatgaataattattattttaattactatacttaaatgtggaggtaagataatgcatttagttcctacagtaattgaaaaaacaaaccaacgtgaatatgcttatgatatatattcacgactattagaagaccggatcatcttattaaccggtactattgatgataagatgtccagcagtattgttggtcagcttctctatttagaatcattagataacaatgctgatatttttatgtatattaattccccaggtggcagtatcaatgcgggaatggcaatctatgatacaatgaactttatcaaatgtgacgtttcaacaatcgtaattgggatggctgctagtatggctgcctttttactcagtgccggagctaaaggtaagcgttgtagtttacctaatagtgaaattatgattcatcagccattaggagcttttgaaggacaagcgagtgatattgaaattagtgccaaacgaatcttaaaacaaaaggaaaaattaaatttaattcttagtaaaaatacaaatcagcccatagataaaattgttatcgatactgatcgtgatcactttttagaacctgatgaagcgcttgaatacggcttaattgatgaagttatttaaaacgaccaacttatgaagtgaaccccaaaaaatgatgtgtacccagttttctggacacgtttaaatttagttttaaaaaaattatgccatggatgctaatctgtacaaaacaggtggcatccattttgttttttctgtattcttttattgcagtagaaaactctgaaaatgaattgtattcattttcatacccataatagacttcattttttaatcggccaaagaaagtttccattaccgaattatcataacagtttccttttctagacattgattgtattatactgtgttcttttaatgaattgatataatgagcatgttgatatttccatccctgatctgagtggaaaatcaatccttcaaggatgggaaacttttcatatgcctgagtcagcatatctgtaatttgtttaagattaggatgcggtgataaatcataggaaataatctcatttgtaaacctatctaatattggagaaatataacattttccccatgcaaaattgaattgagatacatcagtagtccatttttgtaatggtctactcgcattaaaatttctattaataatattatctgctacattccctttataagaatggtatctctctttaggacgtttacctaataatcccatattatgtataagtcgttgcactctcttatgatttaccagataaccgcgatttagaagctctctatgaactcgacgaactccatagcgtcccttattttgatcaaagatttcttttatcagtttcatcatctcatgcctttagaagatgctttaatcgatatcctttttcacgaatttctttaacgattgctgctcttaaacgtattagttcttttttctcaggaggagtaagttcacttgatattatagattttttcagaggctgctccttactatgtcgtcccttctttaaatcgagaccattatatccatatattttatatcgttttacccagtttgacagttgactgtgattaatattagcacttattgcaacactttttttgagattctccagctagaaccctggcaactaaagcgtatctttcttccacagtatactcagtgcaggtggtaggatgttttaaagcatctattccatgtaagtcagcgattttgacccatgtagtaattccttttctaaagtttttttgtccaattccttctggtgtttcatgccatcgaccatttctatatagttcaacacaatttaacttaaatacataatcatatttcatataaaaaacctccttactggtttgcccagtaaagagggtacgcatcacaaataatggaggttcattttattatcagttagtcattttttaatatataactgtctagatcaaccaaatatataaaaatcagctatcctaaaatataaaaagaagggaaacatatttcccttctaaatcaaactattgtctttaaaatctattttcatttaataatttgtacaagctaaataatcatactatttttgaattacgatattgatatgctaataaacctgttaataatagcattccacctggtagccaaaatactacaaaatgataccactttaattttaatcccttaaacttattcagcatcttatatcccctttatcaatctacatataatataaggagataatcacatattgtcaacataattcggcataatttagatttattaagactttaatttttttaccataaataccatgtcatcattaatcttaaaaccatttttctgataaaaatcagcactgtaaaattctcgtcctgtcaacaaagttaaattatcaacttcaggtaaacattcctctaatgcctccatcattttctttcctaatccccttctttgacaatgaggatcaatataaaaatcttcaatcataaaatcaagatcattaacatatgttattaatttcccacaaacaacaccagctattttgttatctaacatatacacaaaacaccttgtatattttccgtcgtctaactgttcaattcgctggtatgatctttcataactccatacctcattccaaggaggatttttaaatgcttcaaccatcagtttagcaatctcttcatagtcatttttagtgacacttctaatcatctaaaatctctcgctttccacaaacacaataattactcttaaatcgttctacagtatgaactacttctttagttaaaaaatcaataagtctttcatccaattgatgttcttcaaaactactttggttaggataaatgagtttaccaggaaactttgtttcaaagaaaattgtatttaaaatcgtaatgctttcaagataactccctaatgaagttaaatgctgattgtcactttggaacaattctaattcgggattttgatggcttaaacgattaatgacataacccactggtattccatcaactaaattatccatcattacttgatgataaatatctttggttgttttaaaatcatcatcataattccgttggctccaaggaatcataatgtatggcataacaccacagctacgtgccaattcaatcaatgctttagcatcatgcaatgttgcttctttacttggacaaggctcatgtgctgcctgttgaaaaataacaaaatcatatccttgttttaaagcaaactgtaattccattgactctaaatgatcgtgaaaggtaattgcaggacgggccaacattgtcacttctaacttttcactactattgattcgcaccatttctggcatatcattcatatacgtatgcgaattcccaacaaataatattttcatcctaattccacctactttcaaaggactactcctttagtatagcttcaattacgactacttagcaatctttttaaaagtaattattgctttaaatagatccccatcgattgcaatattaaaagtccccccctgtgcttcaacaaaacttttagctattgctaatcctaaaccactgccactttcatgacgcgatttatcaccacgaacaaatctttctgtaatttcttgaggactaaaattcatctgctcttgtgaaatatttttaaaaataatagtaatatcctcagtttcctccgttaaatcaacatatacacggctattaaatagagcatatttagaaatattagtgaatagattctcaaaaatacgatacgtcttatcaccatctaatttgaggattatatcattatgtggataattagtaataacagttaattgatgcgcatctaatatttcactacattcagcatgcgcctgctcaattaatgcaacaatattaagttccattaaatttaacttgatattaccactattaactttactaacttcaaataaatcttcaattaaattcgttaaacgattagaatactgatttaaattatctaaatattcatgtcttgtctctattggtaaattatcatcttgcaataaaacaatataatttttaatacatgtcaatggtgtttttaagtcatgagaaacattacttactaattcatttttcatattctgagacttagtttcttctttaacagcagtttcaaaaccaattcgaatatttttaaattcatcatttaaagcattaaaaatacctaaatcaccatctatctctacatcaaaattacctttgcttaattcttttgttgcagtcaataatttatcatagtcatcttgcaccttcagcactttatctttgacccaaaaaaatactaaaaatgcataaataatagctaggaaatatccaaaaccccaaaaagtaatcatgatcataatgattgctgtattaatcaaaatatatttcatgattgtttgatttaacgactttgatagatcaatatcggcaatttgattaagtttatttttgatactgcgtattccactaccaattaacgtatcttcttttaaataacgccagaatcctcgagcaaaaatgtactttaattggaagattcctaatgaaataactaaaagcgtcagtatccaaatcacaaaattaataactataacgatgtaatctacatacatgatgtcatatctttttaataattctaaaagtgaattattaagtgtataacccgttacgatcatacagcccataacgccaaaagtaatcataagcgttaaaacagctagatttatttctgctttccatctctttactgacaaaaacggattaacatcttctacaattttaattggataaaataagataaataagactaatatagctgaacaacttaataacgcaatagctgaaaaataattatagttttcccatgaattaacatattgtgaagcatatccatgactggctggtgtttctggaataatatatgtaatttgaagattcttaggaacattaatcttgattgcatttgtatcaaacatccagttgtcaatatatatagtattttcaccatcataatgtgcaaatgagcttaaaaggttagcaatattaaaatatgatagtttatcactacttaaatccccattacatgaaactagaccattttgatcatagctcgcctcagtatagaaactatatttactttgatcatcattagttgtaattttttcactatgttgagaaatcatttgattagtattagtattaacagctttataaataaaatctccatcattattaaacaatgatgttattccctttaaataatcgtcaaaaacatctaaaaatatttgtcttgtctgttcatcaacactatcatcaaagcttactgcttcaaaattagaatcaagggtcttagccatcgcaatagtaaaaagctgtagatcatcttctaaaattcccgttaaattatcatcacgaggggtattttctctaacattatcatataaggatataacaacaacggacattaatagtaatattgatgcaaaaatcacaccaaaaattcttttagcttttgtcattttttacactcctttttcaattttatatcctattccccaaactacttttaaatattctggctttttaggattagcttctattttctcacgcaattttcgcacatgcaccataattgtctcagtatttatggcttcttctttccaaacagcttcataaatctcctcagctgaatagactcttcccggataagacattaataattcaagtatttgaaattctttagccgttaaacgaacacctcgatcattaacaaacacttctttagtaaacttatccagctctaatccacccacgactaagcgctgttgattattattaagattacgattttcttttaaagctaaaatttgattatatcttcgaagattcgaattaactcgagctatcaattccatcgcctcaaacggcttagtaatataatcatcaccaccaatattaagcccggttattttatcaatatcttcagactttgcacttaagaaaataactggaaaatcatagttttctcgtagttttagtaccattgtaattccatccataactggcatcataatatcaaccactgctaaatgtatttcatttgcttcgattaatgctaacccttcttcaccattactagcttgtaaaacattatatccttgattcttcaaaaaaactgttactgtttctctgattcctttttcatcttcaacaattaaaattgtatgttccataatcttctccctttttctaattagaattaactatttttttataataaacggcaccggtaattactagtataacagttaccgcaaagattgaaacagccaatacaatattgccgtctcttaatgctcccattaaatatgtagatgtcacaatacttggaattcttccaatcgttgtaagcaatagccattgttttatatcaatatctgttaagctaactaaataagtcataatatctttaggacttccaggaatcaaaaaaataataaatagccaaaacttactttttttagaagaaaataattttttcacttctgcaactttactttgatcaaacattttatcaatgattgagtgttgaaagattcgtgctaaatagtaaacaataatcgttccaatcattgacccgatcaaacaaacgattgttccttgaaatgaaccaaaaatatatccactagccagctccaaaggttctccaggtaaaaatgctaaaaagatctgcagagcaattaaagcaatcattgctgaaactttagtaaaatatggcagtgtttcaatctcataaataacatcattaaaatcgcagtttctaaataaatatattgtaataaatgccatgaacaaaataattgatgacatcatgagcaaatttgtcttttttattgatttaagcataagtcgttccgcctttctatacttaaataataaaagactatcctaaaactaaactaacaataattcttaaaaaattctaaataaaaaccacgcctaaaagacgtggttttctctgaggctataagcctatgttgcttgctcgcgtctcaaggcgctgctttctcttcgttcaagctatcgcttttgactctcgccatccctcaaagggatttatttcctcctttctccttttgttatcttcttctctcttttttgttttctttcttcatttctttatcttcaaatggattttgatattcttttacactcaatttatccattgctatatcatgtccctcttgttcccttatatattttgcgactgtttgatcatttagtcctactgtactcacataatatccttctgaccaaaaatgtctatttccatatttatatttcaaatttgcatgtcgatcaaatatcattaatgctgacttacctttcaaataccccataaatgatgatacacttaactttggtggtatcattaccaacatgtgtacatgatctgacatcaaatgcccctctataatttccacccctttatattgacataatcttattattatttctcttatatcatttctaagttgattatatatcacttttcgtctatactttggtgtgaagacgatgtgatatttacacatccacttcgtatgtgccaatgaatttgttttttgtgccatacttaatcacctttcctttcttataatgacagcttgaacaactccattatatcggaaaggtgatatctttgtataacttctttattgctccacccgcatagcaggtggttttttatttcgcatacttcgtatgctcaactgacttaagtctatatgttcaaattttcaatttgaacaggtaaaacaaaaagcaaaactttcgttttgcttaattataatcatcttcaatcgtagaatcgacatcctcttctaattcttctgtttcttcttcatcagcataaatatcattcatatcaatatgaacatcactaaatttatgacgacttcttaaatcccaggcattttcaccaaccgtgataaaacgtccgtctaaggtaatattagtataaaacaaagattctttatcttctttttgttcgtcatcaaatttcttcatttgacatacttcttcccataatttgaaaaaattaactgctgatttctttttagacattaattcatatgctacatcaaccatagacatattataatatttatccatactatccattcttgattatcctcctacatcttttctggggcactaacaccgattaaatttaaagcattagccattgtaattcttgtagcttcaactaaagctaatctttgtccacttaattcaagattatcttcatcgattacataacattcattataaaaactatggaataattgtgcaagtctttgaacataatttgtaattttgtgaggcgtacgattgatcgcactatcaataattacgtttctaaactcattaatatgctttactaattcaatttctttaggattaactaataaatcatacttatcactataatcaatgtttgctttagcagcctgtgctttaatcgaacacattctagcatgagcgtattgagcataataaactggattttcattagactttgatttagcaagtccaatatcaaaatcaaatggtgtattagcagctttagaaacaaagaaataacgtgtagcatcaacaccaatttcttcgattaagtctttaatagtaacagcatttccagttcgttttgacatttttactggttcaccattattcatcattctaaccatttgaataatatcaatatttaactggtcagcattataacctaaagcttgaatagctgctttcattcgattaatataaccatgatgatcagcccctaataaatcaactaaatattcgtatccacgatctaatttatttagatgataagcaatatcaggcgtcaaatatgtatacgatccatcacttttaattaagacccggtctttatcatcaccaaattcagttgatttgaaccataaagccccttcttcttcatatgtataaccagcagcttttaatttttcaattgttggtacgacccgatcattttcatataatgatgtttcagaaaaccaaacatcaaacgacactctaaattcatttaaaatatctttaatcttttgtaattcatattctgttcctttatttctaaagaaagcaattgctttaccttcatccatttcaagatatttatcaccatcgatctctttgatctttgttgcaatatcaataatatctttaccatgataaccatcttcaggcattgtaacatcttgtccaaatgcttgtttataacgagcgtatagagataacgctaaattatgaatttgattccctgcatcattaatataatattcacgagtcacatcatagccagcagcactcataattcggcagatactatcacccactgctgcccctttagcatgtcctagatgtaaatcgccagttggattagctgaaacaaattcaacattatatttagttccttgaccatatgttgtggtaccatatgcttctttttcttctaaaacttctttaatgattgatgtcattgcatcttttgccaagaataggttaataaatcccggtcccgcaatctctactttttcaatattggcattttctttatctaaagcctcaataattgcctcagcaatttggcgaggatttctctttaataattttgttagctgcattgctagattagttgaataatccccatgtgatttatctttaggaatttcaattgtaatactttcttgatcatattcttcaacaaatccacacgctattattgcttgtttaagcgccccttttaaagtcgcttcaattttattaattgccatcattgccctcctatcttttaatcactatatcttaattaaattaccattaaaccctcatgaagtcaatgtttttataacaatggtgcaaataatcttaagattgcttctagccaccctctaaagcgccctttaacgacatcttcaggggtcatttccttactcacagcgatcgttttcaagaagtcctctttaatatctttaattgctggaacatcatacatatagactccacattcaaagtgcagataaagactgcgataatccaaattaattgttccaacagtagcaattttatcatcacaaacaaagttcttagcatgaataaacccaggagtatactcgtaaattcgtactccgccatttacaagtggttcatagtaagagcgtgttactttaaagaccatttttttgtctggaattccaggtgtgatgatccttacatctactccccggcgaacagctaaacacaaagcatttttaatttcatcattaatgattaaatagggcgtatcaatataaatatatttttgtgcttgattaatcatatttaaataaacgtttttccccaccggcttattatccaatggtgaatcgccgtatggtaaaatatacccatttggacttatttcgggacatatataatgacgaggatgatatttatcataatcttcaaatgtatttaatgatgcattccacgttgttaggaacatcagtgttaaattccatacagcctcacccttgatcattacccccgtatctttccaatgtccatatttcactttagcattaatatactcatcagccagattaaaaccaccactaaaaccaacatttccatcaatcaccgtaattttacgatgatcacgggtattcattactgccgaaataaatggaacaaaatgattaaatgctatacacttgattccataactttccaatttttgataataacgaaatggcagcattgtcaaagagcccatatcatcatacataaatcgtacttccacaccctctttaactttttgctttaatatcgttaagactgtattaaacatctcaccttcttcaacaataaaatattccataaaaataaaatgttttgctttagctaattctttcaacaaatctggatatgtatcatcacctaaagggtaatatttaatctcactattattataaataggaaaattttcttgaactaaataattagcttgtccttttgcaatcaaatcctcaatttgttcaaccatcttatttggataaataaatggtctaatagcttcttcttgattagcaaaggcttcttgaagctttttagctggctttttattaccaaaaacaacatacaacaaaccaccaaaaaccggaaaagataagatgggaattaaccaaataatcttataactggggtcatcatcgtcattgttgataatatataaagttacgatcacacttaaaaaaataaaaactccttttaataaggtcgcatcagtaaaaatatagcgcataaataaagctagccataatatctgaacacatattaaaataatcgatacaacgatccggtttgataaaaactttagtattttcatcttagttctccaatattaaataattgagcatgacatatacttgactaatcaaattagttccatcatataattcatactttattttcacattatccccgttatcataactaattaatctagtttttaaagcaattgctccatatggagtttcatattgatttaaaatatcacgatctcttactaaatgcaaaacactagccccattatgaagtttaacttcattttcacttaattcaatttttattttattttcatcttgataactgactacaattttatcatcacctatctccagatgaccagaaccatcatatttaacagtttcttgatgttcttcatatttaaaaatacttcgataatttactttaattatttttttcattctatcaccgtgcatattataacacaaatccgtcaagaatacttttggtgatatgatgaaaaaattagtaaaaatatttgtaactattttagcaagtttagccggcatacttctatcactatatgttattgcatattgcatgggggaaccggatctaaacaagaatcgttatttaaaattatacgatgataatcaagaaatttattatcagtcgatcaacgactataccggtcattatgtaactttaaataatgttagtaattattttaaagaaagtattgtagctattgaagatcaacgcttttatgaccatcgggggtttgatccaattggaatcatgagagccctcaaagtaaacttcacaaatcaaaaaaaatctcaaggagcgagtacgataactcagcaatatgcacgcttattgtacttaactaacgaaaaatcctggtcgcgaaaaattaaagaagcttttttgacaatgcagttagaaacacgtttatcaaaagatgaaattctcgagggatatattaataacgtttattttggtcatggaatttatggtattgaaaatgctgcacaatatttttatggtaaaagtgctaaagaactagatttaaatgaaagcagtatgttggctggagtagttaatggcccaacctattactcacccttaaatgatgctaaagcagctcgaaaacgacagtcaatcgttttaaacgctctaatcgactgtaaggaaattaccgtaactcaaaaacagcaggttcttgatagtgatcttaatcttgctgaaacgcataaagtagatgataatatggctaataattactataaagataccgttattgatgaactcgaagaacttggttactacaacaatacatatttgaatcaaggtttaaatgtgtatacaagttttaatcaagattaccaaaaagtagtggaaaaaagtgctagtgaatatactaaggatagtaaagtcgaaacctcgagtatcgttgttgaaccatataccagtaaaatccttgctattatcggcggtaaagactatgccagctcacaattcaatcgtgccactcaagctaatcgacaaatcggcagtacaatcaaacctttgttatactacctggcgctagaaaacggtttcactccggcaaccacatttttatgtgaacctactacctttaaacttgacgataacagcacttacagtcctagtaattttaacgataaatatgcatataaagatgttacgttagctcaagctattgctgtatctgataatattttcgccgttaaaacacatctatttttaggaactgataacttagcttcattaatcaaaaaatttggaatcaaggacgtcaaagcaaatgcctcactggcacttgggactttaaatacaaacatatataatcttgccaatatgtataattgtctcgctagtgaaggaaaatacaatcatctctatacaattgaaaaaattactaatgatgctggtaaagtcctttaccagcacgaacaagaagataaacaattgctggagcaagatagttgtttagaattatcacagctattaacatctacatttaatagtacatttagtacctatcttcaagcaacaatggcttcttatcaacttgataatatcaacgcctgtaaaactggtagtaccgatgttgataacctggctgtagcttataatccacaagtcctggttgccagctgggtcggctacgatgacaatcgtaaaatggaaacagctgatgacaaaactgttgctaaaaaaaccgttatcgatgttttaaactataccaatgaaaacaaagatgttacatggtatcagccaaccgaagacctacagcaaattgcaatcaatccactaaccggtgattttgatgaaaatggtacagtctattggtttaaaaaagactaatcccgaagtttacacttcgggatagaaaatcttatgatcatttttatttttcttagaatttacaattgccccaacaatttctgatacttctggtaaaaaccggagttcttcatcaattaatatttcaatttcactgagttcttcagtatttccataataacgatagggaacttggctttgatcatcacttacaacataataacgaggatcatagccttttttttcataaaatgattcagctaattgtttttcatgttgatcgagcagatcatgataaataaacaatcgtcgatctaaaaagcgtgtacataaatctttcaaaatctcgtcattgccttcttttaagactgtaaaataataaaaaacgatcccctcatctaatttagtataatcattttcatcgacatgtccatcaagaaacggctttaaataacgaatatctccaaaatcataaccagctgcataaagatctttcattctcctaaaaatactaattaatacctgttcataactccgggctgtggggtgataataaacttgccaatacatatgatatctggctaaaatataattctcgattgcttgtacaccagaattcttaaaaacgatctttccatcacaaacagccatcactcgtaaaattcgggataaatcgaattgcccataagtagtaccactaaaataagaatctctaagtaaataatccatccgatcagcatcaagttgactcgaaaccatctgtactaaaattttattaggatgtgttttttcaataacactacttactctatgtgaaaaaccatgatcaaatttttctaaaagatcatgtacttcggtctttccgttaataattttaattgtatatgcttcgtggtttaaatcaaaggcatcttcaaaacaatgcgaaaatggaccatgaccaatatcatggagtaaagctgcacacattactgttaacttatcataatcatttaaataggctccaattgcactattaaaaatcatttttcgagcaataaagtaaacccctaaagaatgacaaaaacgcgaatgttccgcactttgatagacctgatgcgtcccgcctaattgcttgattctccgaagtcgctgcatttcatgactattgattaaatctaatatcaatggttgatctacatgaatataattatgtactgcatcacgaaaaaccttactatctgttaatttcgtctgttctaatcgatatgccgcttgattcatcagtcttcctcctcgtactcctcaaaacgatatgtttattctacatttgggtacttctttatatcaacttttgataaaaacatttctaaagaacgaataaatattttttatcatcatacatagcttgataaataacaacttcctccaatgtttcactatctaacccaatattcataacataatatagtttgcctttgaaatgtcgatataaatgtcgagtctttaattttcgttccacgttctcaccactttttctattttcattataatacatcttaaaagtttatgctataattgagtctaggaggtatgacatatgtacattaaaatcaatgaagcaacaaactatattaagacccaatatcatggaaaaattgatttagcaatcattctcggttcaggtctaggcccacttgcagatgaaattgaaaatcctatcgaattagattatcgcgatatcccccatttcccgatttctaatctcattggacatgccggcaagttaattatcggtacattagaaaataaaacagtaattgccatgaaaggacgttttcattattatgaaggcaatgacatggatattgttacactgccaattcgtgtatttaaaagactgggaattgataatttaattttaactaatgcttgcggaggaatccgtgaagatttaaatcctggacaaattatgctgattaaagatcatattggtttatttgccccaagcccactacgtggtcctaatctcgatgaattcggccctcgttttaaagatatgagtgaagtctataatcgaaaattaggaaaacttgctcatcaagttgccgatgacaataatattagtttaaaagatggtgtctatgctttttttaaaggcccaatgtatgaaacaccagcagaaatattagcatatagagccttaggtgctgatgcagtgggaatgtccactgtaccagaagccattgttgctcgtcactgtgatatgaaaactctgggaatttcgttgatcactaataaagccgcaggactttcaaaccaagaattaaatcaccaagaagttgtagaagcggctaataaagcagaaaaagacctagttactttagtaaaaggcattataaaaaattggtaaactaaaagcatcatactaaactgaccctatagaaaacacatttatcgtgtttactctatagggaacaatttaaagatgcttttttattttatttgcacagtatttaattttcgattaacttcactaatgtctttatcatccatagcccgaagatacttaattggttgattggaatcataaacatctatttgatcgacccctaataacctatctccatcttcaccgtaaatatatccttgtcctgctaaatcaatgtttgattcatcaaaaacagaaacaagctcatatttgtttggatccttaaaaacatcatagtatctaactactgctttcacgacaactgccttaccaaccttttgatcatttaccctaatatgatttccttgataaaaatatactccctccagacgatatccatccatagccttaacttgctgctgtgcaaaatttgccgcccattccttatcatatgctattttttcttgacaggctgtcattataaaaagaaatagtaataaacaaataaatttctttaattgttgcattatcctctcctccacaagctattatatcataaaaatatttttttattttaaataatctttatattatctaagttctaatgatatttacaaaatctataaaaataatacaaatcctaataaatactagtcatttaaccgattaacggactaatcgtaaagctcattatttttaataaaccatgaaaaaatttcaagtcttgaaaaaaaacacacgctagaatgcgggtttcgggcgatttgttacttatttgttacttatttagtacattttatatcgaaaaacaaaaacatattattaggcatacaacaagctattatgattaatattgagtatgcaagttgataaaaaatgacaaataactataattaatattgtacaattattgactcccactataactccaataattgtacaatagagtatggcttccctttcctattagccatgctagacaaaaagcacaagttcacctctcccgtttttgacttgtgctctttttgtaaaaatattgtataaaataagatattattatatacttttaatatgcatagtacgcatcccaaaattatgctaaaaacacagtgttcattcctatgtcactgtgtttttctttatacaaaaaagcctagatcaattagacctaggcttgaattttatatatttattgtttacgtgtatatcgcgatacccattattaataatactatgagatagccccatatacaaaagggtatactctatccttgtgtttaaacagttcccctgaatatcttcagcatttatttttaagtataccttttccataatctttacattttagttccttttaataaccagtcccatgtattagatcctactacaccatcttgaacaagaccacgatttctttgaaacacgataatagcttctttagtctttttgccaaagtccccatcaacaaccaaattaaatcccacactgtttaatcgttcttgaattaatctagtaataccacccttcgcacctttttttacagttggataactagagaatccttgtctagcaatttctgcatttaatctatttaaccagtcatcgacaggttgagaaggttctggtgcaggggttgatacagtagtgccataatcaatatagggacttttgccatgtttagtccattttctagatttagatccacttgaaacattagcacaagttgaaacttgaacaccattatcccatttaggagtagcttcaactactttgccattaccaatataaatacccatatgacctttcatccatacaatttcaccaggtacaatattagagaagttcgtagacactccactacatttagaaataatagtatctgcattttgatctaatacaccattagatccatatttaccactagaaggatatccccacaagattccttttaataacccagaacagtcccattgtcttttcccgttagacgttttatttccaaatgtacctaatttataagatgtggcactgttagctgccgcctttactttttctactaattgtgctgctctcattactgccatgttatttatcctcactttctttatttgtctgaataataaaagcacgctatctctaacgtgctccagtttatttggtttttaatatttcctcaatcagctgttttccctttaaggtccacttaggaaaaccatgctgtcttatctcataccctttattgcggtatttactatatagccaccatgttttcttcttaggatagtggattctatttttatgaagaatcctattcagctttaccgcactcattccatgctctctagcaatctcatcggtgctccataacttcttttcactgtcttcatcaagttcaagtttcatttttagttgattgttttctaatgtaagttcctgatttaagcgaacctcatcaactagcttctccaacgcttccaaataattaccaggtaaagcaggcatttcggaagttgcaatttgaggcacagataatttcttttccatttcttcaaaacgattgatgtactgataagtaaataaaacccctttttcacccgtcaatttgttagcaaccatttcacagccttttttggttaagagataacaaggttgctctttgttttgactattaacataggtactttcaataaagaattgaggactaggtaatttttctttgtccaaaatatactggtatcttcgtacttttttcaacaaatcgcaatgttgtatgccaaccatcttagcaacttccctactgtcgattgttttaatactatccttgatgattaatccattatccattgcagacacccccatacacgcttaaaacatactgttcttgaggttttaacgacttcatatatttaaattcatcattggcccactggtagactttaattggatcatgattacttgatacatgaataccgaagcagttgcgtttagtatccattaatgcaaaactgtttttgtgactattctttaaaattgttataaacattgttatattccccttttcaatttgatgataagaggtacctaaatcgaaccctaaaaggtatacaatatacctgatatgtagtataatataagtgcctcgtaatggcatttgcaaccgtattctgtttagcgactgaacggttgcttttattttgcctttaactcgttaaaaacccttttaatccccatgactatgatatcggtcttgcttttacctgttttttcacagcaatattcaagcatttttacttcatcatctgtcattctaattctggtattattttttttagggttttcagttgggcgccctgtccttgggctcatatatacacctccttaacttttggttacacatatatattaatttacggtaacacataagtcaagaggtttcaattaattttcttctttatttaactgttccaaggcatcttttaatttatcagggattttcactcctaaattagaaacattttctaacagactaataccctcgttggcaatgtagaaatagcacacaagtgtacgaaatacccatgttccggtattcattaatctatctaacattacagctacaattaaaataattaagatcatgcatttcttgactaaaccctcaaacccggcttcactattaagtttatttttaataatagccacaactacaccggtaatgtagtctaagaccataaatacaattaaaataccaattgctacatcccaccccccgaataaatacgtaaaaaaagtagccacaacagctacagtactattaaatactttttccatttttttcattttcctcaccttcagtttaaattttattaagtacagctaatacatagccttccttgataccttcatctataattaatgatttaatctgtgttaactgtgatttcgaagtataattgacttcttcttcgacagtttcgatttctctaaataaaatataatcgttctgctcataacttgattgttttaaaatcatataatttgtttcaagtaattggctgaatttacttgctgtaacatctaattcatgtgttttaatcataattttttctcaactttcttatcgatatctatatccaataactcttaaaatatgttcttctatctattactcttttgttaattgccataatcgtagctacaaatctgttgttttagtatagcgcaaagtgatataaccagtgtagctactcttatcactggcacttccaatgataatatcgccagttgtagggtaacaaattatactttctcctaagctccatgggttaacatttggaattggcaatgccgcagatgatgaacttgcaacaccagcaacatcaataaatctatcaatttgattaatgccgtgcgatactgttttaacattattatttggcaatgctccaatattaatagttttttcatatatcttctttccatctatccagtaacttcctgtaaattgctcagcattggagtatttaaaaaatacctccttaccatttaatcttttttctttatctttaaatccaaatatttttattgccatataagttatgacttttagaaatttgttcttctaatttttcgtgtaccacaatgttaaaacgacatcatgtctagtttctccattagtattaatataaacatctccacctgtagtaacaaataaatctgtacttgaatttccattcataccacttattttatcgttagctctcattgaaaattcatatcttatatttctatcaaaattagcgatattttctatttttctaaaagcattaatagtccctaaattgtaagatttttgataaatctttttgccatcaagccaatattccccagtgaattgttccttagttgaatactgaaagtgaatattcttttttcttagtcttgtaccactgattaaatcaaataattttatcattagagatttctactgtctctagttagtagtttttgtatattcaataacaagcttgcagtttgtaacagaactggtactgccgttgttaacagccagcatcattacattgccacttgcgttatttttcacccgttctatggttattcgattattaccttcaacatatggaattgctctattattaccatcccatccagttgcctcaccataatgttttacaatacagctcacattagatagtattatcgcaccataattaacagtaccggttataacctttctataaatcttctttccgtcgatccagtattcacctgtaaactgttcttcggttgaatattggaaaaacgtatccttacgctgtaatctgataccgctttttagcccgaatatttttaacatactgtactacacaaaccagagtgcgacctttcgctagtagaccgcacctccatttttcttagggtataagatacaattagaagaatttttaaataaatttctaaaagtaccccccccccgaattttcgatatttaattgattttatcaacattttttcatccctcctatatttctaaatcaacagtttcaaccagttcaaagacgggctgttctacatcgtcgattaaaaatcttccatatacatttaaatcatacccaatttgaaattctccttctttattgcaatagcgtccccagccgacaccgtttttgtgagggggaatattaagtataactttaccaatatctatatcgtgaattacagttactgtatttccaacattatcagtaatggaaacttctacctcatgggtagtatttaacgcataaccactaaatacatatccttgtccactgttaaatgcagttgatttacttgtattgttgatttttatacttttagtttttattgcattcccagttataacacaataagtaaatgtaggcttaacataaatgtaagtacccttgattatatctttagttcccgaactgtcgcatctgtatgtttcaaaagttaatgtcggcagtgtatacgcagtaaccgtgactttaaccgttttacttgctgtaaatcctctactgtctgtaattgttgcggtgaatgttatatcacctgatttacttaaaacatcggtagtataggtgttcaattcaccactataactgtaatctctaccttttatactgtaagtggttatagtacttccatatatccccttagcaccatttattgttaatttaatacttgatttaccttgcaaatacaacgaaccaaatggatttaccggtgttgcagtaatacttgtaaagctgggattagcgttggttatagtatatgttctatcgtgatagcttgcccactgcttattgttagaatataaccctatacgaatagtacaagttttccctttacacgcttctcttaactggtttcgttcttcatcagttaattcccatgtataactccccgtgttgggaatattatccctaactgcaagatgcggtccgtttgggttaggctctaaccagacgctcatattaaagccacctggattactgaatttaatagttggattttgaacatctgtgaaattgctactttctgtaatgttagcctgccttgggatagtagttaatgtatgtgtataaccctgctcgcttgaactgaactgactgtgacttatccaaccagtaacgcttatagcttttgaaccgtcagcattatgaccgacagtaacatcccatgtacctaaacgaatcggtgttgatgtaattttttgaccggtacttataccagcactgtatactccgccgtttatgcgagcatatactgttcctgttccatatgtagtataaccagtgtttgttcgccatacgtctatccaaactctaacaacagagatgtttgaatttatgtcatacgataattcctgactgttaacactgtagtttatatatttattacttgttccaaaagttgccattttcacacctcctaagttaatgtcagaccatcagtagcatcataattccagctgaacgttccgatatttaattttgtcattacaatggcatattcaatgttaagctgttggtttgacagatatgctattctgcttccattttgatagaatcctaattccgtattagataatttaacagcaaagggactattgcttgcacctagttctaatacaccatcctgaaatctagcccactgtgaaatttcttccttcgtggccagaccacttatattgtcggtaatacttttaatactgtttgtaaccagtgatatagaactagaattttgaacaatctgtgatgataactgctctatcaaagttgaattgtcagtagtggtagtctgtagtttttcaaccagtgtagtcagcgattctttaagctggttgatcgcagaagtatattcagtggtaatattctgcttcatatcattgatatcaccagcaaaatcattagtcacttcccatgtagtaccgttccagtattttagaagattatcagttgtatcaaaccataacttagttttatcactaggtgcagtagcactatgaaccgtaccatcgtcacctttgtcacccttatcacctttaatcaaactccatgtataatcactggctgaagttgattccgtaagggttgtcttgttgtaagctaaacctatgtatgttttacccgatggatcatcagacatattagcaccactggcacttgttgcatacttaacccatgtataggttgttttaccatctgtaccctttggtccctgaataccagtatcacctttctcacctttgattaaagaccatgtataatctgaataattactgctttctgttgcagtggtcttattatacgctaaaccaatatatgcttttccagttgggctgtcactcataccacttgtaggtgtatccgcatatttaagccatgtataatactgcttcccatctgctcctttaggtccctgtacgccttgtggtccttctattttaacccatgagtatttattaaaaactgtactgtcagcttcagaaaaatccacatatgttccaatatatttacctggtgtttctccattatttgaggtaaaagtttttccgtcatcactgtacttaatatgtagatacgaagtttgtccatcgcttcccttcggtccctgaatgccttgttctcctttgcttccagtatctcctttgatcttgctccatttatatgaaacatatgagctcggagctgtatttgatgttgttgagcatgtaccaatataaacagcattctcagcactgtcagtcatcgggttaccattagcattttgagagtatcttatatggaaataagaacttactccatccgctccagcaacccccttaattccctgaggtccttgttcacctttgattttagaccatgtgtaactgtcaacatttgtaggatcattagaattaaagtctacacactgtccaatataatcacctgctgtctccccactgtttgcagtaaacgacttcccgccatcattagaatattttatatggagataagaagtcttgccatctacaccattagttcccggtattccttgtgtcccctgagctccctgaattccctgaaatctcgcccatgtatattttgttggatctgtactgtcggtttcagtgtaatcaacataagtaccaatataaaccgacggagtttccgtcatttgactagagcttgtcggactggcaacactgctgtatttaatgtgaaaatacgaagtctttccactagaaccatcatttcctttaggtccagccggtccttgaattccctgattaccttgtggaccctgaagtccctgaagcccttgtggaccagtatcgcctttatctccggtaatgacgaatggaattgttgttgaggtagtattattactaaattttgtcgtatctttgcgccatagatactgcccatttgttctaaccggttgagcagttatccatccgctgtcaggtggtgtcgtactgctgacattaactgcaaagtaaggtgtgatactaatcacactaacaccatcatccccagttggaccttgcggtcccactgctccatcttttccatcactaccgtcagccccgtccttacccagtacatttagactaaatgacgtaaacagtttaatacttgtgtttttatacgatacataacagacatatgtaaccgccggattagccttggtcataatatttttacttacattcaatattccattgctaacattctcaccattcgtaagtccagtttctgaactgttgattatctttttaaagacaatatcacaattacttaaatccacatttaataatccatctaaaactgctggagtaatcgtaatattgttaatttcccagttaggactataagttccgtcagtatttaaaatctgtactaactgtgaaccggtaacatcaagaaaactattacccaagttagcaatatcattattatccgtaatggttatatttccagtatctaattccgtaccatctacagtaacgatgcatttaaaatttgcacttacatcaatatcatcatttgacaatgtaactaatttaccagtcttaaatttttcatcatttctataccattgaaactgtatgtcggcttgatcagcagtaatatcagtagttccattaagcacctgacatgttaatgtgattgatgtgtttcgttcatttaaaacagttgctgatgcgtttaaattagctctatataaagaagtatcgatattttcaatcttattagttatttcttgaatccgcgaatttatctcacccttaatcttatcaaccgtcaattcagttcgcagtatcttgctttccagagtacttgcaacactgtaattgatttgactctttgttaatgccggtgtagagaattcacttttaatcccaccagcataagacatagaatgattcatcatataagcatttatgtatgctccatcctcaatttgaagtttaataacatcaccaatatctaaatgaaactgcccaggaacactggcaataaatggaatatatttaaatccattaactctattccatatggcatttctagatgtataacgatcaatatctaaaaatggattatccgaaaattttaattcagtcaatccgtttgacttaatactttcgtcgtcctgaatatagacattatcgttttgaggttctctagcaagaaccaaagaattaattggaccatatgctgtttcaatagttggatatttatactggttatctaaaggaatagtaaaatcaacatttctaaaccatctaaactccaatttattttcacgattaattgtagcaaatgtacaacttgcctgtgcaaccgcagtgattacatcgccgcatgttgcatcatatccaaaaaacacctcactcggtatgtttatatccttgtttagaaaatcaagagtagctaattctactcctgcctgtctacaggcctccagcgctgcttttaatggtgttgatgggtatgttaatgtctcagtatcaaatttcctgttaaagaacattttattatccatgaatttgaattcagtgtctgaagtcttttcataaacgttcatagtccccactggtacattttcaatcgttccatcggcaagctgtataccaaaaaacaaattaaaggactcgttttccaactgtaacaagtcctgtttatttatttttatagttccactttttgcgataaacgtcccaatgaaagcatcattgtcagtactgtagatattattatctacagtacatttttgaatatcgtaagatttttctttaaatacaatatgtgcctcaattctacgggcattatttaatacagctttgttaaaatcactgcttacactatacatcagtcatacctcgcattcgaatttagtacaaattccatcgtttcgtaatagtccatcattcctgttaatagtgttttcttaggatcaacacaatagcagtcaacagtcttataggaatcactttcactatcaagaaatcttacatttatatttggctgctttagaatattaagaatagatcgccctgttgccttatcagttatccccagtttaaccgtaatgctcatgattctgcctagaatgtcgcgattcattagcaacgttggtgttcgcccagaattctcaccatcctgagtagaggctagatcatcaaattcaactatattctttatctccatatcatttaaataaagcagaggtttatatgccatcttttaccctccaatcatctggcgttctttttttgcattctcaagtaaaacagataattttttaatatcaatatctacttttaataccatatttttaactaattcaataagttctctaatcagcatgatcaaagtatccataccttcggtatttcctttactcttttgcatcttaagcgcagtatcaatcatatcaatcattttatcttcaggagccacaacttccccctgatgtctgttatcaccaatcatagccaactgcggctgattaggtttaacgtatccaccttgtgcgagctttggaatctgaggaatattaaagccgtttggtacaattgtaaacggctttccaatcaacggtaaatcgatattatgaatagtctttaacgcatcactaatcacttttaatggtgctgcaataactttatttataccaccaataattgcgttacagatacttttaaaaatgtcaccaatcgcacctacaacaccatcaaatatttttccgcctttgctgaaaaaacttataattgtattccatgtgtttttcacaaaatcttttagaccgttccacattttttcccatgtcttttttatactgtcaagcacacctgaaattgcagttttaacattatttattgaagtactaacaactgtgctgatgctgttccagatgccaccgacaaagctggaaataccgccccagacatcatcccatactttttttatacttgctaaaacttcgtctatattaattcctatagcttctaaagcaaaagatacgatgctgcccatcaaatcccatacaccacttaagattcctttgattccttcccatgctttatcccagtctcctgtaaaaacacctgttaaaaaatcacaaagtccacttaaaaactcagttattgatttaatacagtctgacacaaaagttacaaaggtttctataccgttccaaattccttgaataacatcagcaactattggagctaaattactcattagccattctataaaaggagcaagtacagtttcaaaaataactcctatcagttctgcgagttttccaaagaactcaacaacaccgttgattgccggctggatatgctcttcccacatcgatgaaaaactttcagctatgccgttgactactggagcaatataagtattgtatgcatctaaaatagtactaacgatatcagtaagccctgttttgattttttcaaacgcaggtgcaacataagtatcatatgtttgtccaattttatcaaaagtgtcatttataccatcagcaatagttcttgtgattgtttctataggtttaagcataccttctatagttgtttttatcttttctttgttttctatgattggggaagttaaagcatcaagtatatcacttccgagtcggttgattaaagtaattgaatttaatgctccgtttacaataattccaattaaattagcaccaatatttatagctgaagctcccgaaaaaacacttgcaatatcagcaataacaacactaaaattacctaatatttcattcgttctcgagcttatatcaaaccatttaactattgtatcttttatgaaatcaacatttctttcaagataggtggctacactgcctactaacaaagtagcgattgtaacaccaatacttgcaattgaccctactatttttcctaaagcaagtactgtcgtatctacccagttctttgcagcattgaccacgtcaggtgatgtgaatatctgtgtaagactgtcgcctatactcaaaatatattctttaattctttcaatatttttaaatgagtcaccaaagccaatttcaaaaccatttgtaaagatcccggcaagtcgtttaaactcattaataattccatctaatataccatcaaacacactggcttgttttgttgcctctggaaaatctactgtatcagcaacacttccgcctgaaccgtctcctgatccatcacctgaaccagatccaccggaatcagagtcatttccaaatgacagtttattaattgtatcgaccttggcgaaggctttttgaatcttcttagctgctttttcgccacttgatcctgcattctttaatccatcgcttaatcccccggcattatccgtagcacttcctaaatcgttggcaacctcctgtactgcgctatttccgcctccactatcaccagagcttcctgttaagaattccatcatattggcaaaagaatcagctaaggactgcagatttgctaacacccagttgattccttttataatcggtttaaatactgcaataaagcccttaccaagactcgcttttaaactttgaaaccttaaagacatgattcgagtctgattggcccagctatcctgtgtcttaatgaagtcacctgtagccatagacagctgatcctgaacgaacgcatatcgtaaagctactttttcctgctcagacattttagcagtcgtcttgccataaccatttgccaaagcatactgatcaagtgccgcttgtgtcattacaacacccaaatcttttaatgtctcggtttcacctgtaaatacacttttgatttttgtataagcctcagttggatccagattgtagaatgatgcaacatcacccgctaagcctgttaaagtctcagacatttcaagtgcttctttttcagtaaatccaaatgagtttgacattgctccaaaagtacccatgaacttcttagccatagtctcactaagaccgaatgattccattgcgctcttagcaaatgcatcagcctgatttgacatgcttggaaacgcagtatcaacaacgttctgaacttctgttagatcagaaccaagttttagacacgatcccataaagtcagtaatagccttaacactaaaagctgcgactgccatcttaccaattcttttaaaagatgaattaaaagatgattcaagcatattggaacctgaatcacctagtttttttatctgtcctttataatttttgccgttgattacaatatcaaccccaatagcacctacactgttacctgccttctgcgtcacctcctgctaattccttaaacatattttgaaacatcttaatagcatcatctgcttcttttttatccatactttttgctattttattgcgccattcacttctaatctgcttttgggccgatgagaaattcttaataatatttttatcatcttcacttctgatctgcacaatattccccagtggtgtgtccggcatgattcctgcaagataagaacagaattcatcccacgacatatcatcaacctgtcgcaatcttatgccgtactgcttgaaaaaactggcttcaatgagcggccagtcatctatgatgtcataatagtcatcattgttattgcttccactcttgaaatcgtttttctatatcatcgatatcctcatcattgatagcagccataattgcaaatgcaacggtttcataatttttaaaactaagcttcatatcattaagctcttttgcctgtttttttcctaacagtgtttcaatcatcttatccattctctcaatattatctaatgagttatcgcgcataatctgattcattaacagaattgttgttttttcatcattgatagtaaaaatatgatcattgactgtgactgttggtttttcattgtcaaatttatctgttaaattaatatgtttagccatttattggccctcctttatttatatgaaaattaagagggatcactccctcttaaaattatgctgactgtgtaaatgtcggtttaccgttagacattacttcgaactctagcggtgctacacctgtagaatcacctgcaccaacatttgtgacgttgataacagcctcattgaattcaattttagagccgtcgggaaatgtccatgaaaaatctttctcgacatcacggccgtttttgctgatcagtgcagcaaccgcatcattaccggcatcacctacattacgcttaccagaaacagtaatagttactgctttagcagtcgctaaacgtctaacccatccttccgtttcgaatggtgtccactcttcgattccgttatcgaaagaaacactaaacgattccatatcggctatagaactcatagttttagcatcacccgtttttgctgtttcaatttgaaactgattttcataacatgggtatacacctgttttacctgccattttaaatcctcctatctttcataataaaaaactgcgttgataaccatctcgtagacaccattatcatcagtatctacacttatcggctcactttccagcagttcaatatatttaatttttacatcatcaatcatgatgtcagttttagcttctattttctcatagaactgattagaagcgatttcagttctgtcctgattgttatcccagtgaatcaggaaagttactgctttttgtctaaatgatgtattctcaagaccacctaaagcaatataaggtgctagtgcttttttagcattatagacacctatagacttatcattcttattatcgagtttaccgatataaaaatgctcagcaccagtatcaagcgtttttatccagtcttttatctgttttaaagaaagtatcattttaatctccttttcagcagctctgcaaatgcttcagggacaaaattttcatattgtccacccttcttccatggatcaagccacttggcaccggcaaaattattgttaattgtctggaaatcatactcaggatgataatatagacgtcttgcctgtggagaagtggtaatcagtgatactgccccgtatctgctgtttgaataatctacaaaggtatcatcattctgcatcgtccctacatcaaaaggcattacttctgcattgacaacttcagtatgcagtgcctcaccagtttgttccagtgccgtttggatatctttatcaaattcttttatctttgccttgtaaaatataaaagccactttattcaagctccagtagagtataattcactgatccgtcaggattacgtgcctttgtgcctttgtacagctttcttttcatcccaaacacttcagcttcaccaccgcttattacaggcagcattggtgcaatatcaccgttaaaatacaccttaccgctcaatgtaacaagcttctgttcagcagtaagaaccttataagcttgatcctgaaaattacatttcaaatcttcatctaaaacaataacaggctcaccttcttcagataaacctgtatcttcaatctttatatgaattggtgtcgtacaaactttatcaggcactaagctaggccatttcaatagtagaacgtcctagcacataaaccggtttgagccaaagtgttataaagatctgctggaactgctatcccatttatgatctttatattccaactttcaccaaaattcatactcacaccatttattgcatatgaagataatacgctctgcagcacttccctgttttcatactcaaactctgctaataagccaacaacttctttaacagtttcttttctaaactctgttaatgcatcaatattaacaattctgttaaatgttaatgtatctacatgtcggctggcttgttttaagtatcttaactgatccttttctggaacaacagtatctggatttatatttttaaattcttcaacactcaggtaaggcaaatacataaaatatcacctacccttgtgtttctttgatcaatgcaataattgaatcgttggtcatttcttcggccacttcaatacctagttcagccgctttagaaattaattcccccttgttcatttttgacaacggtttttctttaggtggtgccgttgcttctaattcagcaatttttgcctttaattctttattttcttgaacaacttttacatatttattgtactcaatctttttcaaaggggaatattctaaaagattcccctcatcgtcatagatatcatagccgtcagctagatatctctttttctgtgcatcattaatgcgatagatcttattgtctttttttgctttcatctaagtacctcctaagccccttcagcttcagcgtgaataatacatccctcagctagtaaaccgtctaatgcaaacgtaccattgaaacgtctattttggtataaatagttatctgccgtacgtgaatcatgaccaggtgtaaatacattgatataagaatatttaacacgtgatacctgcgcttcaggatcaatcaaaatataatcaatttgtttacctgatgcatcaacttgatatccttcagtaaaatcaaatgctgttttcaaccggtttgaaggcactgttttaatttctttgatatcgtccaaagaatgaatacgacgatcaagaccgttagatcctgccccaacgtttaatgttctttggataccatcagcattttttaagattctacgatatgcaggtgtacagtataaaataactctttctaatggaacaccagcttcctccatagcttccagattagcatcaaaatcagctaatacattagcctccgttaaattctcggttttaatttttgcacccacccgcttagcttcactgtatacctttgaatatgtataacagtctaattcaggcattgcctgtctacgttcaaatcttgcttgaatattagcaatagatacaatttgatttgtctcatcgacatccattgggtcaataaagaattcaatatctctatcatgatctaatgatttttcttcccagtcgtttccataagtaccagtattgaatcctaaagtagctcggttatgatctttatatccacttactgttacctttggtaatttaattgtttttgccccacggatttgaatgtctagatttgaattgaacaacgctgatgatgtcaaatcatgatcatacatttctaaaatcttagaagcaaactgtgttacataatttaatgctgccatttattggccctccttattttttattttcctattccaaaaatactgtttagagcctcatcaactccacctgtatttccgttactgcctggcgctccaatttgctgaaatccattttggacttcattagatccacctgatttaatttcaggaaatgctttaacgatattttcaatttcagttttaaaaacatcatcttcagcaagattgccatcttctttagaaagtttagatttatctactagcttggctaaaaacggaacctttgaagcatcgatgccttgagccaaagcaagctcattcatttttgaatcaatattcatatttagaatctgtgctttaagtgctgcattttcctgaatagcagtttgtgcttgcagtgctgcctgattttccttttcagctttttgctgtttaaataactctgccgcctgatttaattcctcaccagtcaagccctgagtttttagataaccctttaaagcactttcttctgtggctgatgtcctttttgagattgcatcagctatttttccataatcaatttctacttctggtgaagtacttgatgatgctggaggtgtaccttcccctgctgctccatcccctccttcagcgaataattgaatgtttaatggatacttaaataattttgtcacgttgttttcctcctgttttacgtgtggcacacgaaatatcccgttttaggtgtggcgcaccatacatacagttttatgtcatgttgaggacataataaaagcgacctacttttcagcagtcgccttattgaccttattaacttttacttctttgaccagtcccagactgattagatacttacctcgtttttcttcaacatcaagggtctcagctctcttgatatactcctgttcatttttatcaaaatattcatgaacaatacactttactttcaatctaccaccccccttactaaaaaactgcaaaaagaaaagcacataacgtgcttatttaataatatctatggtaccttttgctaaattctttgctttttgcattaatgaattttcttctagatattctaatccttttagcgttatctgtggtttgatcagtgcaacttttgggtaggaaagttccatcggttgccaaacctgtacaccttcaatataatcgttatcatcaagcattttcattatgcgacaccacaatggatatggtatattcaaggcttcatgacttatactggatttatcgaattcctcatattccatcgccttttctaaaatagataatatcttataaatcagcttaaaattgtttgccatactaattctcctcatcgtcatccattatttttcttctcttttaagctccttaacaaattcccacaaatcagggatattatcatcactgctgtcaatatcaatttcatgttctctatgttcctcatctccatgaaaaataatatgaccgtctttatttcttaacaatttatacttatctttttcttcttccatatttccatcccaacctttttgataacatttttaaaatttgatgttttgattctgaataagtcatacccgtatctttagccagttttatcacttctttttcagcagctcttgtaaaatctactatttcatcatcactttcaaatctaattctactaccttttggtgtagaaaagaagtattgaaaattatcttcagtttggacaatagaaattcctattggttccacaatattatgagtaactatatcactaaatgaaaatggattattgctaggatgtgtgtgtagtgaaaacagtgtgttgtcttttgctgaatcgatgatttttaattgtccttctgtaggctcggaatattttttaccttttgaagagctgaatcctccttgtattttaccattgttgatatcagcaaaagccaaacattcggagtctgtttgtttacttcgtaatactaattcatcaaaatttttatctatttcctcttgaacttctttagataaagttaactcctttggtaaatcatccgattttttaaatgaattaagaatgtctagatcaccgttatcttcaaatagtatttcagctttttgtttagcaaacttttgaacggtatcatcaaatctaactttttcttttgcataatttctatgcatttcagggtgtttcttgataagctgacggtttctagcctgccattcaagacgttttctcttgtatttggattgattgtcactatcaagtgaattgttctctaaacgcttatattttcttatctggcgttcattataccgctgtgtagcaactaaatcactattttcacgagttttctttacatcagcagctttaggaattgtggttattccttcaaaataagttataataatatgcttgcagttaggatggaataatccacctgcaatcgccgtacttaataataggtatccgggtttctcagcttcttcagcagttccacctgaataaacatcatcaatatagagtttgccctgccatggtaaacaagtaggactacaggcaccataccgactaacaaaaacagtatggataccccactcagctcttttagtgccctcaccaacaagataagcttttttgctagcattacgaatagccatttcagcatatgtatcaataccaaccctacggccattcttgtattcaatacagttgattccttttgctaaaaaatctttggtagccatatcgatagcctgatcaactgtcatagttccagtattagcaaatacctgggctttatatatagttgagcggtattggtcattggccattctaagcattgccgaagatgctttttttagatctttttcagttgcattaataattgcctttaatttcctgtcattgatacgaaaaaaagcactactaattgcttttgtaggctttcttgtgctgaatccattttttatagcttttaatatctgagcttcctgttttgtgtttgctgactgattagttcttttaagaagctcctcaagtttaagcttcatagtattataatttttatttacgtactttttatttgaacgcttaaaatcttctaacgcttccagttgtaaggtctgccaggcttcccagttaaacccttcatcctgctcccatttttcatgacgggataagtttctagtcattgaatcaatcagatattcctgcatttcattaaaaatactgcttatatcgtaatcgttcatgaccaaacctcctaaactaattttctaacatagtagcttttatatccttttctgttccatcgctggacctcatcaagcagttctactggatcctcaaattcatctttgcgacattcaaaaataccgtttttttcaataccaagtattatgttctttcttttaaaattcttcttaagctcacgtacaaaacctttaaattcatttctgcccattttgtaagtatgaccattaattaacactatcatcgatatcttcctccggatcatctacatcaggaacactcattcctggttcctctaattcagtaactccctgctgttcttttaaacgtcttacttcttcgtctttccattctttatcttttgaatcgccgtacatttcttcaactgctgcttcaatcgacattactggtgaacctggacgagcttttgatacagtttccaccactgcctcaaatgatggatttgcatattcaccaaatgccacttcgatatcttcaaattctcgaggctccttcatattaaaaatatccattgcctgcaatgcagtgttaacaactttaggaattgttttttctaatgcctcaacaatcttgccacgagtataaagtgttgttttttctttttcacgctgggcgtcagcattatctaatttcttaacatcaatccctaatgtagatggactcattattccctgcaagcactgatcaagaaaagtcgtatatgactgaatatagctttctactggtatattgggctgaactacttcaatcttgtccttgctttcctcttttccagtatcacaagtagcgatatagcggttatcaaaatcatttgctttcatgacttttccggttgtcggatttcttggcagcagagagtcgggaatatatttagtggctctacccgctctaacagcatctgcccactgtgatataacttcatcaagcgcatccatactgtcatacttgtttgaaaaaattgacttacctcgatgtttccactttgatgatctgtagattttaaaaggaactgctaaattaacagttcccctgcttataacttcgttatctttttcctgatatcctgaaaatacataatctgctaccttttcagtttgtggaatagaatgtatatctacttccttgcccgtacgagcctctacaagcttgtttttaatataaccataaccatatgtctcataatgaatgtatttcttttgatttgcatcatagacatttttaaagattgtttctacatagcggcctctcttgtagataaattcacactgatctgctgggtaaaattcaattattggatatttactcagtagtgtatcaaaagaaatcttaaacactccgtcaccttgaaataaagtatcaacgattgcctgttcagcaacatcatagaagttgttatcatcggatatttctttccagtcaatagaacttttttcaggatcaatcctattgagatcgcgtataacgatacctgccagtgtatcaaccattaaagagggcagtcctgaatgaatcttcctgattgatatttgtggcactgaaccccagaaagtcgagttgttgtcattaacctcttcataaaactgctgaagttcataaggatcaccgcgataccagattttatttcttatcgcattactgtcaaagctgtataattcttcgatagtaaactgcgtattttgtgcctcatttagatcaagccagctttttatcatatttttgatagcacctcctattttactcatctaatcatctcctatcagtggattaattgtatttatttcatgtttgtatggcaaccagccatactgactgccgttgatcgtgtgatcacttttatcttcaggagcatattcatcatctttccatgaataaacacccatttctcgtatatgttctttgcagtggtcaactaccaggtagtttaaattctttatccagtcctgcatcagttcaatacgcgtgattatcaatgtctttttccatgcattcgcaagattgaaaatagacccatttattctcttatattttttccattccatcatggtcgcttgatctgcattatcaagataactgtttctagcaaaaccccatttacgcttattcctttcaagaaatgctattagtctttctatattgtcacttggagcaattggaatctcgattgtagcattgttgaagacttcttcatcaagaataatacacttaccgcactcagtgataccgataaacatataagtaatcgtatcaggactgttttgtgaatatgcagtatcgataccgcatgtaaatcgtttaaatttatactgtctggcctgttcttccgtaataatattgtccttaccaaactgagcaaatacaagtccagtagccttaccgcgtagtccctgaatcttattcttaaacattttagttcctggaggtactgaatcaatctttatttggatttgttcctgagtaagagcagcgttatcgtaaaaagtaaaataccagtgaatccatccctttaccggaggttcgttgagttcttccagcaactctttaggataatccttgatataccttttcaaaggtctgctgcgattgataaattccttatatacatcaagtgatggatcatcagggtttgaagtagtcatcatgtattcacaacggtgagttatctcacgcataaactccatgtcagcaatattgacctcatcgacatatacgcatccaacctgacctcctaacaccttttgccaacgtctcttgttatcataaccgcagatatagataatcttagtaccttttagtgttttatactcgacatgcgggagtccggtctttccatgaccacctggccagtattcagccaatccctccatttcatcaatcaaacctcgttcagcattgataacattcttttcaactgttcctttgtcagctcctgcaatgatatgaaacttaatatcactgtcagccaccctgagcatgaatttaactactccaacagtcgttttaccagctgctgttgttccttcaagatattctctaggagcccttacagttaaaaaatcagcaaatttaggacttaggattaatgacattaaacatcatcatcctttaaaggtttcatctgttttaatagctcactgattgcatccagcttcttatcctcgccttcgtttttaacttcaagcttatcattgtatattcccagatgacggtttagcatatcaaggcttttattcttgtcatacaattttacttctctttcaactatatcgccatcttcagttggaattgttttaacctttacactggcgattgctgctagatcatcgattgaggcttcatccatgacaatcgcttcattcagattcattacgtctgccggattaacaaacgcaagtcttgccagttctcttagcactctatcctgagtaatacctgtcctcttagaacgttctgccattgctctatctatagcgtctttaacctgtctacgctttaacatcctacatgcttgttcagctgcggtttttggactgaaacctgcccgtatagctgcttgcgttccatttagatctattaaatattcttctacaaatctttcctgtttctctgtcatgatttcaccacactttctataaacaaaaaagcgaacctgttgtccgctaataatattaaatttggttgcaggaggcggaattgcaccaccgacttcgggggaagatcccgacaagctgctactgctctatcctgccataataaaaggcactacttgagtgccttaatcattatttatacttgtatagtacctctttttcaaaatattctttatttgttatgtccatggtattatttaaatacaaatctttacccaattcatatatttccttatttaaagcataaatcttatcatcacatctattaatttcagaaaaataagataatactgttgatatagcaagagctattacaatagacgtaatagccgcaactattgcatcaaaataatttttctcacttataagcggtaccccgaataacaaaacagcctcaacaattgctattactacaataactaagataccatttttattataagcttttttttgtttctttgttgcatcagcacatacaattaaggatgcaattctactattaataatttcttccatattaaccctcccactttctatgttatcacaattatatcacgtcattccacataaagcgacaccacgaatattaatgaaaggaggcattaaatgaatggcgtatcagcaccaggtgatgccgctttatctggagacaaaaaaagctctgggagaatgagctttttcatatttgtataatcaaggggaagtataagaaacacgaatcaaccaaaaagaaattaatcatctgtgtgtcttaaccaaaagaccacattaccataataccacatatttcactgccataccatgacacggactgacaactttattaaatttcaagattatttatagcatttcgacgatagcgatacacattacgcgctgaaaaacccatttttttagcgatttcgtcatactgcatcaagtgaatatatgcatatttcaacaccagacgctcctggatgtttttcaaagtatcgatcgtatgctctatcttttccatttcattaaatattgcttctttttttgcatatagttgttcaattgattgtcttgttcctaaagctggaccatagcttatagcttttatccccattatttgtccatcaacatatgtaagctgatctaacttatccctataggattttaaatactgtaccttttcgttgtagtccattcattctcctcctacagcatttctttaagtttaacttccagcttgcgtatatacaatacgactgtgtccttagcacttttgcatccttcaagcgaatcaagctgctggtaacgatccaacagctccttcatgagttcttgtttagtcatttctaaatcctccttattttgtaacagtatctgttagaagattaactacctttaatacactctcaagtgtactgctgtactctttttcattttcacgatcagctcttaacatcttattttcacagattaaatcatcaagacgtttttttaactcaatacattcgtgctcatagttatgcgccggttttctagattcagcttcaccaagcttattaatctcactatacacagcatcaatagctttatcccaacctttattgtactcgtcggatgcatcagtaccgccaagcccggcaacaatttttaaaatttcacttaattctactttcatttatttagctccttcagcggacaccagcggggagacgtctttgttggtatctcctccggtcctctaattctggatatttctctttttggctgacattcagttcttgctataccgcagtaataaatactactgccaccccgattgttagccatgttagagattaaatgttcacaatttttacatttcattgttaatcacccctcttaaataattgaacgggctatcttcggtgttttcgtctttgtaatagcagtcataacaatcgtgtatccaggctaactcatgtgacactttatcatcctctagctttgataacatctcaaattctttcgcatgtgtattatctttccaagaatatctgttcatcatgtaaaaagcatcataatcattttctaaatcattaactgctttcgataactcttctttattttccatacgctattcctcctatacgtacaatcttaacttttattaacgtgtaccattctttttgataaactcaattacatcactaacgttcttgaatgttgtctgcttctgcatattaattgagccaataattgtattagcgattaaataaggatcatccgtattcttcgccctagccactctacgaatcatgatcatattgtcatttaacctagtcggctttacaggtttcaaactgttgggctcaagtaatggtttaagcttctcatgataacttttagtaaccattgttgtctcgccttcacaataataaagcctgttcaggaatgatttgctaagtccggtaatatcaatcgcctcagtaatattctgcgccagggtccctttatcaagcttttttaaagcatctttaaaatcctgaactacaagctttacctttggctcttttgtacgtccccctctgccttttgatttagctggaacttccggcatatcgatgtcagcaatctctgcttttagcagcgatgcaaatccaacatatacccccagctcgttcatatttaattctatatttaaatcatttttagcagctaatgcttctatatcctcaataaatttattagctgtttctgtttctactacgattcttctcatttcttatttcctccacgatttaaatcacaactacttccaacagcataaaacagctgggtttgttcatacaccattttaaacttcttacatttacttcgagttctgcttattggttcaccacttactttgcagaagttatttatatttttacgacatgatttacatattgctgccataactaattcctccctaaattttttctaaatgtatccatataccaggtatttcagcccaaaacttttcgatagtttcactggccactcttgcatcattaacataaaaccctaacttctccatgatgtcttttaaagctttgtttaaattgtcagtatcaggtttcgtatacttatactcaccgtcgtaatgttttccaccgttcaacggaaaacaccacttcacaactaaccttaacgctccgtctaatggtttttcaggtctgtgaggtagtagattaaccatcaacttatttttagccttcactagatcaggcggatcatagaataccggcttaccattaacaactgttacatctttttcctgagcggtaacagttggtggtatcatcggcataaaaaattcaatcattgctttcatttaaacccttatcacctcatacataaagtcactgccgataaaactgttaacttttattctgaatttttcacttataacaaacattctaaaatattcagactcaggtgaaatatcaatcgaaagtggaccaatcgattttagaatcccattaccatccatcagcggcagatgaataacatcactgtacttagtcagcaataattcttttccagtcacacagttatatccaatgacctcaatacatgcaaaaccgctatcatgcacttcatcactttttttaaatctcaattccgtgaaaagattttgactcttatcattcatcagttatcactccctctttttctttagcatcatttttatctatgcgacaggttggtgccactttacgttgcggtatgggtggtcgtcgtgcgtaagctgtcgcacgactacctatacccgcgtaagtggggtggtccgacaacacttttatatacgtagtatatatatggtccgtcgcacccccgaccgaccatggttaatcgcacctgtcgcacccttttatttttcctttcttctaatatattttttcttatcttcaccataataagtttcataatttttacataattcttgattacttttttgtccacttccaagccatcctaatagagttcttgatgtggtatttaatttttcagcaagttcttcagcagaaatttctctattttccaattcaatatttgagaactctatttcaaatgaattgactttactgattttatttttttgagcttgctcctgtcttttttcttttgccttttgccactgcggctttatatcatcaggctgaatatcattcaacacgccacttttatcaactttatgaacaggataatcaaaccaaagatttactggactaaatttactgaactctctaagtgttccttctattcgccatgctgaaatcttttcaacttcttcacgagcatgatttaacatagtgtcaaacaccccgtattttcctttaggtatacgttttttacaatagtcaaccatttccctttgacttagcatatcgtcctgagaaacatcctcctgccatccaggataattcttatccaaataactaatacaaaactgacatgctgcattattctttaactgcttatatacattttcgccaggttccaattcgataaggtccataagtgcatcaggatcacgagcaaaaactccagagcctgaagctcggtccattgaacgtttaccaccctgcgaaccttttgaatggtgatggcagtatacaactgcagttcccaactcattacatatcttgtcaaactggttacagaagttggccatctgatcagcgctgttttcatcacctgttatgactttataaattggatctatgataatagctatgtaatcctttttggccgctctcctgattagtttaggagctagtttatccataggaatggatttacctctaagattccaaatatcgatattagaaagattattaggcgttatatgcagagcattgtaaacatctttaaaacgatggagacacgatgctctgtccaattctaaatttacatacataatctttccctgagcacaattgaaatcaaaccactttgtaccttcggctattgctatacacatttcaataagggcaaatgacttaccagctttggatggaccggcaataagcatcttatgtccctgccttaatacaccatcaatcagtggcggtgcaagatcaggcatattatcccaaaattcattcagtgattcaggatcaggaagatcatcatttactccctctatccattcaaaccattcatcccatgaactcttgcctatgttggttcctacaagaaactgttttttaccatttctcacaactcccggcatccttgacagtcttgaaggattacgattttgtgtatctatctctagaccgtttttcttacaaatgttatataaatagtcaacacgttttctatattctctataatcggctgcttctatttttactatcgcatggagtgatttaccgccagaatgaactaaacaggctaccggcaattctaattctctaatgattgcattttgctcatcaacactcatagaatcgctttcaactagggcatatctataatctgttacattttcatttttaacaccgtttccatcaactggattgaaacggatccatgcaccgatttccggattataatccccaataacttcacctacgtcaccgttacttttagcaagcagttcaatgagtttgcctgcagttctgtcacagcatccttttgttggaagatgtttctgcttttcttcgttaaaccatgactttgttacataagcaacattttcagtagaatcaaataatgtttccagataggtaataagttcagctgatgggtcccaaccccgtggttcccgaacctccttgacctcaagccagttcctgtctactattaccttttcatctttcgcatttataacatcatcccagtcaagttcatgaccggccccgtcttttactggcggtgtccatccctgatcttttgcatattgaacaatcgtacctccggtaaccccggagccagtgaatgtatcccacttttttaagcactctttatcatggtaacgtttggaatccctccggctccatgaatcccattcactgactgaatagccttcgtattttaaagccatacctacacaacaccactcctggtaatccaaacgtgacggatctatgtaattaagtatttcaattagatcagttgtatattccaccggctattctcctttatatgtttttggatcaattcctttgggtatcttccatccgcttgctgcaatccggtttatcagactgcttgcagcatcaaaactccatgttcccacgtgctgaaaaccacggctttcaagaaatctaatttgtttaggtgtagttaatccttcctgacgtctcttatccaaacggtcaagtaacaaattagcttttcctgcattgtcaatttcatctggaaaaataccgaatttttctaaagcctttatctgcttatcacttgctggtgccatttcccagccaaatgatggcttatatcctgataaatcctgatccattatgctcatttcaaactgtagcggatcaacaagttttcttttacgttttttcatttcactcagcagttttgctaacgattcttcacgctgagcaactacatcatttgaagcctgctcttctgcatcttcaatatcgatagcttctaacacatcttcaggaagacaggcgttcgctttgtcttcaagattctttgtcattgttttagccacttcttcatcttcacagataagattggctggatgacataattcatgacgttcagtgtgccataaaaaatcaagcaataataaatggtccttgccctcgcacagacgagttccacgtccgaccatttgcgaatataaacttcgtacctttgtaggacgtagtacgataatacaatcgactgacgggcagtcccatccttcagttaacaacattgaattacataaaacgttgtatttatcattttcaaaatctttcaatatttcactgcggtctttactgtcaccatttacctctgcagctctgaaaccattttcgttgagaatatctctaaatttttgagaagtctttacaagaggcaggaaaacaaccgttttcctatccatacagtattttttcatttcttcagtaatctgatgaagatacggatccagcgcagtacctatatcgcttaccttgaagtcaccagcctgaactccgacaccggacaaatccatctttaacggtaacgtaagcgcctttataggtgctaaaaaaccctctttaattgctttaggcaaagtatactgatatgctaaactttcaaaataactaccaagatttctcatatccccgcgatccggtgtagcagttacacctaagaccttggctgtattaaaatattccaaaactctttgataaccatcacttaaacagtgatgcgcctcatctataataattttgtcaaaataatttctggggaactgttccattctttttggtctctgcaatgtctgcactgagccaacaactattcgaaaccagctcccaatacatgtttctgatgctttttccattgcacaccctaatcctgttgatttcgctatcttatctgacgcttgttcaagcagttctccacgatgtgccattataagaactctatccccgtccttaacacagtcctttgcaacttcagcaaagacaatagtttttccacagccggtaggcaaaactaagagagtcttttgaactcccttgttccactcattgaatattgaatcgtgtgcctcctgctgatatggtcttagctgcattaaaactgtccaggattatattgaggtgccgcctgaacaaatgactgctgcacttcatcttttggatagaatttcttgattttgttgtacatatttccgttatactcctcaggaacaactttgcatctaccagttgctcctggaaccatttgccagttcattctgagcggctcatcttttttcttctgtcctattcccctaaaaaattcactaagcattgtttcaagcttggaatgaagcaatagattatgttgaatctttacatctcttccacttgcgggatcaacaattacaattgttagatttgcttgattgcatggtggaatctttttacctcctccatatcttgcccgttcaaaactttctactctaaaatcataatcaccagcaggaagtgtaatatattcctgttcctgctgaattgtatcatcccatcctagttctctttccataccgttttgttgttgataattattatccattacttatatcctcctaaaattgtctaatctgctcatcgattattttaaatacctgcggccatgctgcgataagcacaccgtcaataaaactcgaatcataattttctattggtgtttcataaggatagtaccctttgcttgccacagctttttttaattcatcttcagtaactaagtccttattcattagatctatcaatgctctaggtaaagcagaattactttgaggcattacttttgcttcagctgttttaattactggttccagttcgcttcctagctgatcaatctttttactaatattttgatttgattcaacttgtggctgaaccgcctgagattgtactgattccattgatcgagtatttatttcagtattttgtactatcccattaaagatatgcgcgatgcctgtataatctaaaggcatttcttcaggcagtccaaatctgttttttgcatcccagcagggatggtgagtagtatacataacacgctgaccaccctgtgccttgtgtttcttaccctctttatcggctgctacactaaacgttttataattagcaaataagactatatcggcccattcttttgtaagcggggctgtttgtgctgttgtttttttaccaagtttcagctcatagcgatcataagctcccatttcattaggctgttcaaattttctaattactgcatgtgcagttaataaaacattgatattagccacatcaatcacatcctggagaagatttaagaatctaccccattcttctgcgacgtatgtatagccgtttccgtatccaaattcttcaaccccactcttgccgtgtcttgaacacactgcttctacacatagtctttcagcccagtcagcggtatcaatcacaagtgtcttacatggttttgtctgaatgatccactgaacttcctggataatcatctgccaagatgtcggtttaggcagtcttttaacatcaagttcttttgtagatccttcggtatcgataaataacggatcaggaaactttgaagcaaaggttgatttaccaattccctctggaccatagaaaaccactttcttagcaccgtttataaccccatctgtaattacaaatccattcattaaaactcacccgctttccatttaggtgtctcagcttgttcttttatacctccatttactgacgatagcactgatggattttcttcaagcatttgcccttttacgtatccatcttcaattacaatcgagcattcatcaccagtagatactcttgtagcaattgcctgcagcccttcctgttcaagccacgctccaaattcattcatagtctcaatatccatttgttctaacttatcaatcaatacaaatccacaatccggatttaatttacgtacaatagcagttgcaactcttaactggtcgctcccgctcattccatcccatttcttgccgttatatgtaagttcattatcttcaacacttagtccaggaagtggcagatcagcaccttttaacagatcaatacgctgtttgcgaatctcttcaatctttacagtcatttcattatactgactagcgtaattattcgcgtcttcttcagccttatccttatctaaatttgctctaactttacgatttatttcttcaatttcagcaagatttttttcaagttcttcagttgactgatcaataagatctagtgcatccgttttagcaatagttagatcatttgtcgctttgtttaattcagtttgcttagctagtaactgtttttgtagtgcagctacctcttcagttaaaatcgatacactgtattcaatttgagttactttatcacgcttgcgttgattctccccgttctttgctaatattgcctgttgctgattaattagctcctgaggcgaaattaaatctttaggtgcttcagaataaaatacctgttctttagcatattttttcttttgatcagcaattcgtccaatagccaatcgattattatagatttcactttcttcataattcagctttgcaagctgttccccgacaccaattattcttaatagaatattagctttctccttatttgaagcttccataaactttggaagatccaaagccagttcttcgataaatccattcagtatctgctgacctgccttgtttccattagggtcagtaatctttaatgcgctgttcttacctttacgctccactaccaatccattgcttaatgtaatattcagattaggtggaactgtggatccttctctagcagcattactcggcttaaatttattgccacccagtgcccatgcaatactgtctaataccgatgtcttgccctggttgtttcttccaccaataactgtcaaaccattttgatttggttcaactttaactgctttaatgcgttttacattttccaattccaggctgttaattttaattgtcatttctgtttcctcccttaaaagtaatgattttgataatcttattctttttgatgacataaacttttacagtctcgtcatttacattcgtttctacacgacagcggatatttagatcctcacgcttctgttcgattatttcaaaataagcgtcattaagattcttactgaacatgttatggttgaagttagttgacatctttgttatcccccaacagttcatccataatttttcttacttcttcagatgatggaactcttttatttgcatttaatttttctataaattcttttccacattcttttaatacatcctcaactggtttgaaaatttcaattatatcttcttttgtaagggtactgatatcttcaacatacttgagcatggcaaacctaagacttccgcagattgaattttcaataggactgattttaaattcatactgtatcagcgttttcggatccatattttcttcaatttcatctaatagtttttttattgatttgcttttgttgccgttaatctttactacttttatatcagctcctgattccattgctgattcgattaattccttgattttatcttccatatttcttctccttttggttatatttttcaatcacccagtcccgatcctttgttactgtctcgagactggactttaaatttctaattactaatacctggtaaacacttagcacaataaacagaactaaaaatatgctaagaaatttaataaatgttttatctttcataagagcatccctataactcccgttaataattccgctgctagataaatagctaatacaattgttaagataccgcgaggtcttagattattgaggttcatggttggtgctcctcttaaagtcctcagtcatcgcaatagatgctacagtttcaatgatttcatctaaagtcatgcctgaatcaaataattctcttactaaagccttaatcttatcttccactttgacttcctcctaaatatcttctataatgaagatggtttaattttgttaggtactgttggcgcagtgcctttttttgtacttttgttgtacgcaattatcaacgcatcaatcagcttttcactcggctcccgatgccactttgtcatgtaatcttcaaatgcgcctcgcggaacataaatgtatcgctttccgcactctgttattttgtaactacctggaaaggatccattaacaactgcactaatcacaaaatccttactcagtcccgtacgttctttaatctcttcaaacgtaacgcctagagcttcaaccttttccatctttctcacctcctttgatgtatcaccttcacacgtgctataattgatttgtcgaatcccaatatagaaagtgaggtgaaataataatgaattttgaaaatattttaactgtgctactatctgccacaattccctctatcattacatatcttgttactaaaaagacctgtgattcaaaaattatacaaattaaaatttctaaagattctgagattaatcagctaaaattacaacatcaacatgagattgataaactagaatctgaacacaagcacaacattgaacaattagagattcagcatcaattagaaaaggattctaaatcagatgatgcaacctctgatctggctatgagattttttaacggggaattgaatttggaaaataccatcaataatattagtaagctagacgatctccaaaaagagatggagcaactcgctaaaaaacaatcaatgccaaactttatcaaaaaacaaaagcgctaatgcagtagtctttatcccgtcatttattacctgtaataaaattggattttcaatcattaatgattcatcacttgagattttagaaagcatctgtaaatgttcttctaaaatcttttttatatcttccttttccataacttcctcctaatctgttttaatcatttacggttaaaccgtaatccaatggtaaaaaaataagctgattatacttaatgttataagtcttttcaattttgcgtaagactggaatatctggatacgacttaccacgttcgtaattacttaaagtatcaacgctgattccaatggctttggctgcatctatttgagataatccacgcatttccctaatcgtttttagagtgaatttcactcctgttgtcttgtccaacgctaccacctccctattgacacatttattctactacggttaaaccgtattgtcaacggttttgccgtaaactttttattttatcttgattatattacgtaaaaaccgtataatatcagtaagaagaggtgattaaattgagtgacttaggaaataaagaaataatggcaaaaaatataaaaagacttatggaactaaataacgttacacaaacagacatttgtaacacgttaaagtttaaaccctcgactttttctgattgggtaaatgcaaaaacatatcctcgaatagataaaattgaaatgttagcaaattattttggagttgaaaaatccgatttagttgaagatagaagtcgatttaattctaattacatccccgaccactttgaaacagtaactgatgcaatggaatttattctaagagttcctgtagtagcaaataactgtggttacgacctcgatactatgtctgaagaagaaataattgaaatggctgaggatctatccgaaatgctacaaatcatggcaaagaaacacaggaaaaaataatgatggaagttcatgaagtaattgaatattataatcaaaacggattgaacgagacattagattattttgacatagacataatacacaaagaactgagagggaaaacggttgaatcaagattagtaatagacttttatgggaaagcaactatctttattcagccagatttagatgagaattacgaacagtttttaaaggctcacgagcttgggcactatttgttacattatcaatgtgatgtaagtttcaattatctcacaagggtatacaagactaaaattgaaaaagaagctaacagttttgcctgcaagcttctaataagcgatatcaatataaaagaacaagaaaatatagactttattgccatggaaaagggaattccattaaaagtatggcattcagtaatgaatttaatttaataataacatattatgtttaaataaaaaaggagggttaattatatggaatttaaggataaatttagcagtattttagatgaaacgcttgaggcctcaaagaaaatcggaaaagctacattagaggcaactaaagaaactctagaaaataaactagatgatattgagcaaaacagaatagagaaaaaagaggcaaaggccgaagaaaaagcagtaaaaaaattatttaattctaacaaaaaaattggtgacttgcaaatcgatacaacaaataagttgtttaaagttaaaaatgcctcttgtgataaaatttttaattttagtgatattatcgattttgaattattggaagatgatatcagcctcgctagcgggggacttggacgtgcattagttggtggagtagcattaggtggtgctggagcagttgtaggcgcagtaaccggaaaaaagactactaaaagaaaagtcactaaactaattgttaaaataactatgaatgattttgatttcccttgtattatgattagtttaattaataagcctataaaaaatacaagcaaagattaccaaaaattatttaatgaagctcatcaaataatttctatgcttaatgttatggtaaataatcgagatagtgaagagtaaataaaatgaatttttttaaagaaaactggaaaatgcttgttatagtacttatagttactgtcctattcccaatagtcattttaacaccaagtaggtatggaaccatatcatatgatactggattaacaatagttggatatgggggatctatacttggtggttttcttaccttatatggtgtttggtggacaataaaagaacaaaaaaaggatttaattgaacaacaaaaacaattagagggacaacgacatgatgacctaattttacagtatgcaccaattgtcaatcttcgtctatgtgataatatagagactaataataaattttatgaaataattttagttgatgcatcaaaaaaagatgaatatttaactattaactttcaattatttaacgcaaacacttatgcttgtatattagactgtatatatttttctggaataaaatgcatagatggtgatggcatggacatacaacaacaaaatgaaattaaaataccactcttaaatatgggatataatttatcgttatacaatccttataatctaagaattaaaatatactatccaaaagatctcagtttcttttctaaaaatagtaaatattcttttgtatttggcgcacagtatcacaatacctttgatatagagaatatcatgaacaacagattccaaataaatttcagtataacaaaacattgctattacattaaaagaatcgaaaaattaaaaatttcagatattgaaatctctattttaacagaagggagagatgattagtaaatgaaaatagaaaaaggcatatatacatacaataattgggacaacaacattagtacaatagcgtatgagataaatttaataaatgaaatatattttcaacactttgacagttttgatgtttccaaacttactgtatcttttgatactacaaacaatagtagcgcaccaatttgttacaaacaaacagatagaattgttttaaatgccaatattatttattggtgtcaggttgcctaccaatattgtcatgaattatgtcattattgcatatctggttatacctctcaaaagtttaaatggctagaagaaagcatttgtgaacttgcatctgtttatttcatggatattttagctgagagatgggctaccaatataatctttcctgaatatagtacacacataaaaaattatgcacaaaatgtgctttctaatgatcaatgtgcacaatttaatttaattgatttaacaaacaactctgaaatatttaatatgatggcaaaaaatcaatactatagggaatacaacagaacagtagctaaagcacttttaaatgtatttaaaaaagttccgactttatggaattcagtttctagaatcggactagtaaataacaatcagtcattaagagaatttttaaacgaatggggcagtattacaaattcgccagatttggttacttcaatatttaactccttcattaaagatgaaatctcctcgcttgataatgtacaatagcccggttcaccatgcaatccagtaattcctatatctaacataaccttacaatcttttaagaggactggaactaatttttgcattgattccttgcttagtaattctccagctagtttaatgaatagatttattttttcacttttatttaattcttcattcatttagtttcaccctttcgcgataataattatatactctattcatttatactatattacaaatactcttaaaagattcgcaacctttttaattataagttatacttatatctatcataagtataacttatatcttaaattaattcaaaacaaaaaaactccactgctaccaacagtgaagtttgaatgaagtactaccaatacttcataattataaaagactcaaccaaaagtccttttacgtgcttaattatatcatttaaacacgtctaaggcaaattatagaaaggacgtgttttcattatggctagaaagcagacttttaagcgcaggccaaataaagcaggaacagtaataaaactatcaggtaaacgtagaagaccctggtgcgctaaaataactactggaaaagatattattaccggtaggcagatacaaacagttttaggaacttttgagacctgggatgaggctgacgatgctttgactttgtacaggcttggtcaaaagaataagattactgatacggaagctgaagcattggcacctgatacatttcaaaaacttgttgatcagcgtgaaaagaatatgcctacctttaaagaaatctttgatattatataccaggaagaattgtgcacattatccaaaagtgctgctcaaggttatagatcgtggattaaacattttaatagtatataccaccacaagatcagtcaaataagtctggccgatctgcaggaaatatttgatcgtgataaagctggttacggtacaaaagtacatatgaaagttttagttagcaaaatatttgaatatgcagttattcacaaatatataaatcgtgacgatgattacactgaatatataaaatgtggcaaagcaaaagaaagcactaaacattatgctttctcaaatgacgaaataagagcattgatgagcgacaacagcgatacggctaaaataatacttatttatatattcactggtttaagagcaaatgaactgctgaatatcccgcgtaaaaatatttgtttaaacacagaattcccctatttagtatctggatcaaaaactgatgcaggtaaaaatcgagtaattcccattcatacttttatcgaaccttttgttaaacagctgttgatgaagaaaaagaaaagaataattgactgtacctactatcagttttcatctatgttctcctcttttttaactgatcataatatgaaacatacaatacatgatactagggatacatttgcaacattatgtcagtctaacaacgttgatctgtttataagaaaacgtattcttggtcacaaaatgaaagatataacctttgatacttatacatctaccgtaattgaaacattatataaagaaatcaacaaaatcaaggtgcctaagccttgattttttgttacttatttgttacttacgaggtacatttaactgcttctaatcgcttgaaacccttgatttatcgtcaataagatggatagatattttcaagtcttgaaaaaacaaaacatttatttgaataaacgtgtatgctttatgtgtaaaataaatatacggaggaaataagatggaaaagaaacctgtaaaaattgtaacaattggtggaggtagtagttatactcctgaattaatggaaggatttattaaaagatatgatgaacttccaatcaaagaaatttggttagtagatattgaagctggtaaagaaaaactagaaatcgttggtgctatggcacaacgtatgtgggacgcttctccttacgatgttaaagtacatttaactttagatcgtcgtgaagctttaaaagatgctgatttcgttactactcaattcagagttggtttattaaacgctcgtattaaagatgaaagaattccattctcttatggtatgttaggacaagaaacaaatggagctggaggaatcttcaaggcatttagaacaattcctgtaatccttagcattgttgaagacatgaaagaattatgtccaaatgcatggttagtaaacttcacaaatcctagtggtatggttactgaggcagttatgaaatatggtaaatgggatcgtgtaattggtttatgtaacgtaccagttggggctatgatggctgaaccagaaacaatcggaacaactttagataaattaatttataaatttgctggattaaaccatttccactggcaccgcgtttttgatttagacggtacagatgtaactggaaaaatcattgatgcaatgtatgaaggtaaagattctggtattcctgcaaatattcatgatatcccattctttaaagaacaattaaaacaaatgaatttaattccttgtggatatcatagatattactatcgtcaacaagaaatgttagctcatgggcttgaagaatataatggaattggaactcgtggacaacaagtaaaacaaactgaagcagaattatttgaattatataaagatccaaatttaaattacaaacctgaacaattaactaaacgtggtggtactcactattcagatgctgcatgtgaaactatcgcatcaatctatgctaataaaaatactcaccttgttgtaactactaaaaacaatggtgctgtacctgatcttcctgctgattgtgctgtagaagtatctgctcatatcggttcagctggagctttagctatcgcttttggaccattagaacctgctcaacgtggttggttacaatgcatgaaaaatatggaattatgtgttgaagaagctgctgtaactggtgattatggattagctttacaagcatttatcttaaatccacaaattccttctggtgaaaatgctaaacgtgttttagatgaattattaattgctcataaaaaacacttaccacaatttgctgataagatcgctgaattagaagcagctggtgttacagtaaaagatgaaatcgctagagatttagactaaataaaaaattcgtgaatttgatatgatctctctaaaatagacaacttaaataaagttgtccatgaaaagagggatcttttcttatggcacgtaatatacaataaaaaaagatacaagcagttttagagtataagaacagaattaaagaaataaaacaaataataattcaagagcatttaaatagtaaagattctttgagagatttaagcaataaatacaatactcattcttcttcatctttatgaagttgggctatcagttataatagtcactaaaaattaatagattatgatcctaaaggagatgtctacatgaccaaatcaaaaaaagcaacattagaagaaataattaaaattgtataatattatttagattatgagaaagaatataaatcagcagctgaactttttgaggtttcttactcacaagtatatcaatgggtaaagaaatatttagaattaggtgaagaaggtctaaaagacaatagaggtaagtgcaaagatgaatcacaattaaatgagttagaaaaattacaatatgaaaacgaacgtttaaaacaccaatctgaacttaaagaaaaaaatattatcttaaaaaagttgaaggaagctaatattactcaaagtatgtcaagagttggaaaatgtatcgataacggttctgctaaaagattttggagaattattaaaagtgagatgtattatcttaacaaatttaattctttcaatgaattaaaaaaagcaattgaaactcatattgacttctacaataacgaaagatttaataataaggtaccaatgaaagtacgtttagaagctctaaatggtactgaaaatccagcacaatatcctaccaataattcattaaattacgcaatggtataataaaagatgctttaccaaatggaaaagcatcttttattttgttatttcttatttcttgttggtttgtacatcccacccggtgaataattatctgcatattttttagatacttttttcactaatgaaactacttttttctttatagccatgttttttcacctccatacttacacctgtaaaaaataaagtaaaaccaattatcatgcttagtcgtggttctataggataaattaatccaatcacagccagacatccccaaaaaattaatttacttattttcacattccgtgcttcatgattttcttgccacataaatgctttagcagcaataagtattgccataattagaagatagctattttcaaaatccgcaaaatagagcgtaccaagatataacaaagtcgttaaaaacatacagcgataaaaactatcagcatgataaccgtctacaaatgtccgtaatccaactaatgcaataataaatattattgtttctagtaccatatttctaaaaatgccgattgctaacaacaaaaaaaataaaatcatttgagtcaaaatgagttcaataccaaatcttacttcatcaatttcatcctcagtcacattatcaacatctaataaaaatatgcttattttttcacaaaaacgtttcatatctatcctccatgtccattatactattaaatcttcctaaaaatattttcaatgtactaaccggtcctattttgttattaaatacttctaaaaaaattaaaactttgtgccggacaatagcacaaagctttaaaaaaagagattagattattaattcagacttctatccaatagacgtttgtgagaaatagctataaatattacttgcggccatgtagtaatattataacttggagattatgtatagaaagacaatactttttattttattattattacatctctcccataatctattatactacacaacttaacagcttgcggttttatcctttttttctacactaacggtcaatattatgacataaacggctttttaattatcaacattcagtaaaatatcgcaatgcaccttgttattttcatagaaatattccattgttccatgataggtttctacaacctctttaatgattattaatccttttccatgatctcttccttttttactttcataattaagaggtctattagtcgaatttattatgctgatcaaaagcatattgcctttactaaaaattttgatttcaactatcttctccgctgtttttaaagcagcttcagtagcattatctatcagattaaataatagagaacataatttgtcttgagcaatattaacattgcgatcaatcactgcatctacaacataattaacttcatcgttattgcgaatcttcgcatttaaacaagcatctacaaaaatatttcccgtacgtatcaatttaactggagcatttaaatcttctttaattgcttttaaatattggttaacgactgattctgtttcgactacttcttctaggacttgtaaatgattattaatgtcatgcttaaacttataaagacgttcttgttctttttctaattcactaatatgacggcgagttgtagcatatgaataatttgctaactctaactccttattacgtaaatacatacgggaagaattgatgatataattatttaccaaaatcatttgaacacctgctaagatcaatataaaaaagatataaatatccccctgttcaactgataatacgtttaaaatcagtacaataatcacttcaacaatattgatcaaacaaaacgaatataaaaattttttaggtaactgatgttccacaaaatcacgtttttgaaccgcatatttgcatatcaatgctgatgatatatagtttcctaaaggaaaaacaactcgcatactcccccatacgatatccaaatatgtattgtcaaaaatttctagcgccactgcaatcataactgagccgacaataatttgaattgaataataaattgtagtgataaacaaattattaagcctaaatctcttaaccaataccccacaataaataaaatccaaactaatacacattaaattaccaattacatataaccagccattatgtggtgaagtatacgtaacaatattcaaaacaaacgtataacttaatataaccataatatttctaagcatgttttctttacgaatatatggataggttaatgaaataacataacttaaagcaacaacatatatcaatgtatataaatactcaataaaaaaattaatcatcactctttgatctcctgcattaaaagattaaatacatctttttttcttcttctactaatttctagcgattcatcaataccttttaattttaaaatatatccattcatcgaaacaaccatattaatattgattatctgacttttatttatttggacaaaattatctggtaaatactgattaacttcttcaagcgtcatataaggaatatagaaattattatcattagtataaaaatgtaagtatctttttactgattcgatataaataatatttctacttcgaaaatgaaaaatctctccctttttcttgatccagatatcatcattttgttgtctacgatttatcgctttaagcaaggttggcgttaactttgtttctaattctgatttaagtaaatatcctgctacattaatatcaaacgcctcctgcattttattttcataattagttatatatattatgatcgtattttgtttcaataatttttttgctacctgtattccactcattgttggcatatcgatatctaataaaagaatatcaaagtttttaccacaattaaaaaactcttcaacatcttgaaaaagttcaactgtatatggttccttaattctagcctcctctacataccctctgattctaagtagcattgaccgctcatcatctagtatacctattttcatctttacacctcatttatttattatacttgataaaaccttttttgactaattaaaaaaggcccttaggccttatcctgttgctttttttcatagtaatttcttaccagcacttgtgttttacgaatatgattttgaattttttctttagctaaatccttatcacgagctaaaattgcctcataaatttctcgatgctcctgtgctgctgaaattaaacgatccggttgacgaattgaatgccttgaagttacatgaatataataattaatatctgttaataattgctcaaaatactttgattgggtacaacgataaatagcctcatgaaaagcaatattaatttcattaaacttctcttgatcacctttttcagcataaaattccattaaatcatacacttcttttatcttttcaagttcctcatcattaattcgctcaattgctaattggattgctagcccttctaaagcataacgaatttccaacatatcatcgatatcacgatgagaaaaccctagtacataaactcctttattaggaatacttttaaccaaaccttctaattccaactgttttagagcctcacgaattggagttctagaaatattcaactctttagacaaggcaacttcatttaatttttgtccttgagtatattcctcatttaagattttatcacgcaaaacggtgaaaattttatttccaagcgacccatgtccggtattttctaataaattctttgtcattgtttaacctaactttctgatgatggctgcggtgaactcgtctgttgaagcactacccccaatatcaggtgttacagtagttccttcttcaactacagctgctaaagcctcacgcaatttattagcatcatctaatttccctaatgcctctaacattaatgcaaatgctaataataatgcactcggattagcgatacccttaccagcaatatctggtgcacttccatgaacagcttcataaattctgaattcatcaccaatattcccacttggtgcaaatcctagaccgccaactaatccagcacataaatcagaaacaatatcaccatataaatttggtgcaactaaaacatcaaaagtttctggacgaattactaattgcatacacatgttatcaacaataacctcttgtggctcaatatctggataatctttagccacatctctaaacgcttctaaaaataatccatctgtatatttcataatattcgctttatgaactgctgtcacttttttacgtctattgttcttagcatattcaaaagcataacgacaaatcttttcactcgcttcacgagtaattaatttaattccatttgccatatttggattgatcatatactcaatccctttatataaatcttcggtattttcacgaatcataaccagatcaatgtcttcataacgagaattgattcctttaaatgatttgattggacgaacattagcataagttgcaaactgttgtcgcaaggcaacattgacacttctaaatcccgttccaatcggcgttgctgtcggaccttttaaagcccatttatattctttaatagcatcaacaagtcctggttcaaaaacttctttcgttgtagctgcatattcagcaccagcctgatattccacccattcaatgtcaagcttcatcgctttagtgatatcaacgacactctttgatatttcttttccaattccatcaccagggattaaaacagctttcattaaaattcacctcccaattctttaattgcatttaataaaccaccgtaattaatcattactttttcacgaggtgataatgttaattcagcctcgattgaatcattagtagtttcattaattacttttactttaccattatgttcaacaacatctttgatattaacgattttataactatcttggtcattgaagaaatcttggtctttagcttcaataactaaaggtaaaataccattattaattaaattagaacgatgaattctcgcaaatgatactgcaaagattgctttaatctttaaatagtttggtactaaagccgcatgttcacgggaacttccttgaccataattatcaccaccaacgatgaatcccccattattagcaattgcacgatcatagaattcaggatctactttactgaatgaaaattttgctaaatgtggcacatttgaacgatatggcaataatttgctatctgaaggaacaatatgatctgtcgaaatattatcaccaacttttaaaacaacttttccactaatttcatctgtaattttttctccacgtggaaccggtttaatattaggtcccatatatacttcattattttcgtcatattcatcaatgaagaaatttccatttttaataaatggggtatttggcacctcttctaaatacatatcatcttcaaattcttctgacatgtaccctttaattgcgctcaatgccgcaatttccggtgatactaagtatacgcttgcatcatttgttcctgaacgtcccttgaaattacgattaatcgttcttaatgaaatcccttttgagagcggtgcttgacccattccaatacatggtccacaaccacattcaagaatccttgctccagcttgaaccatatcagctaatgctccattttgtgaaagcatcgcaagaattgaacttgatcctggcgcaataactaaagaaacatgatccgcaactttgcgtccttttaaaatcttagctgccttcatcatgtcagcaaaagatgagttagtacaacttcctatcacaacttgatttactttcattccttcaagttcttttactggtactaccgcatctggactatgaggcttagcagtcattggcactaatgcacttaaatcaacatctaattcttgatcatatgtagcatcttcatcagctttcatttcaatgtaatcatctactcgcccttgttgtgctaaatattcttttgttctttcatcggtcgggaaaactgatgtagtggctcccaattcagcccccatattacaaatcgtagcacgatcagtcaatgataatgaagcaactccatctcccgtatattcaataatcttattaacgccacccttaaccgttaattgctgaagaatatataaaataatgtcttttgcacttacccatggtgctttttttccagtcaaattaactttaacaacactaggacattgtaagtaatatttacctgttgccatcgctactgcgacatctaatccccctgccccaatagcaatcatacccattgctccacaagttggtgtatgtgaatctgatccaactagagtctttcctggttttgagaagttttctaattgtaattgatgacaaactccattacctggttttgaaaaaacaatcccatgctttttagccacactgcggataaattcatgatcatccatattttcaaatcctgtttgtaacatgttgtgatcaatatatgccactgctttctctactgcaacatgtttaatattcattgcttctagttgaagataagccattgtccctgttgaatcttgtgttagtgtttgatcaatttgaattccaatttgttctcctggaacaagatttccatctttaagtttactacttaaaattttgtatgctaaattcatacccatcacgatatacccccattattcttatattgcatacaattatacaaaaaaacaatcttgattacaaccctttggagcaaattttaccacaagatgtactaaaaataaaacactttaataaaaatctattatttacttgatttaatcgagtaatttttaattacacttttttaataataaatttgtgaattcctaaaataaaatatctacttttcttcttaaaacaaaagccttactataaatatcaatgaaaatatgttagaatacattgggtgataaaatatgttaatagaatgttcaaatataacaaaatcatttcaagggattcccttattaaaagatataacctttaaaattgatgatcatgataaagtcgcaattatcggagttaatggtgctggtaaaactactattctaaaaattattgcgggcgaagaaaactatgatagcggtgaccttttttgtaataaagaattaacactaggttatttaaaacaacagcatgacttagcgatggataaaacagtttacgatgttggccttgatgtttttgcaccattgatcacaattgaaaatagactacgtcaattagagaatgaaatgacaactgatcatagtgaacgtattttaaatgaatatgatcgtctaactcaatcatttcatgataaagatggatatagttatcccagtaaattaaccggcgttttaaagggactgggctttagcgaagaagaattcaatttaaaagtttcaatgctatctggtggtcaaaaaacacgtttagctcttgctaaaatgctgcttcaagaaccaaagctattgttacttgacgaacctactaaccatttagataatagtgctattaatttcttagaaggatatttaaaaaattatcctcatgcaatcatcacagtcagccatgatcgttactttattgatcaagtttctaataaaattgtagaagtcgaaaatggaaaatccaaaagctataaatgtaaatataacgaatattcaattttaaagaaaaagcaaagagctgttgatttaaaacattatttaaatcaacaaaaagaaattaaaagaattcaagagagtatcgatacactaaaatcatataaccgtgaaaaacaagttaaacgagccgaatctaaagaaaagcagttagctaaaattgaacgtattgacaagcctgagaacttgccagatacaatcacgattaattttaaaccaaaacgtgagtccggttttgatgttttaaaaatagagaacctagctgttaaatttgatgaaattttatttaaaaacattgatatcgatataaaaaaacaagagcgtattgctcttgtcggggataacggtgtgggtaaaacaactctttttaaaactatcctcgatcagctaaatgcttatcaaggtaaaattaaatttggtagtaaagtagaccttgcttactatgatcaagaacatagcacactagcaatggataaaactatttttaatgaaattagtgataattttcctaagatgactaatactgagattcgcaacagtcttgccttatttaacttcaaaggcgatgatgtttttaaagaaatctctttactttctggtggtgaaaaaggacgtgttgtacttactgaaatattattaaaacaagcaaatcttttaattttagacgaaccaaccaaccacttagacattgcttctaaagaagttcttgaagatgccttaaaccaatttgaaggaacaatcttctttattagccatgaccgctatttcattaataaagtagcaactcgtgtgatcgaattaacgagcacaaaagccatcagttacgatggtaattacgatacttatttaaatcataaaagcgttgctaagccgctcaaaaaagaaaatgttgattatcttgatatgaaacagcaaaatgctctttatcgtaaacagcaaaataaaataaaaaagatagaaactaatatttctatactagaaaccaagatcaacactttaactgaacagcttcatagtgaagaagttctaaatgattatcagaaatataatcagatcaatgatgaaatttccgaattagaaaatcagttaaatactttaatggaagaatgggaagccctgcaataagggctttttatattcttttaactccaagaatacaataattttcatctacacctgagccttcacaatcaacatactcaacttttactacacaactgatatttgtttttcctagttttcgtaaagaaacacaatccccctgctcaattccctcttctttacaaacaactaaatggttaatcacaccgttacagattttatcaaaatattggctgtcaacctgtaaactacacatactaaaactcctttcaaatctttaaatattgtttatagtgatcagatccatcaatttcttcaattcgtatctcaatcgttttttctaaatcctctacaattgttttttcattaaccagatttttttgactaatccaagactgatatagtggataaattataaatcttaatgttaaagcaattgataacaatccgaaatctattgatacacctaatattaatggtttaagtaacattcaaccatacctcctagtattgccattcactcatgctttgatactatctaaatcacaataactaacacatatatatgctctaaataatttattatgtcagttaaataaaacattactactatacttaaccatatattgcattacttttttgtctaatctagtggaaataaaaatactttaattcttcaatccaaatatttaaataaaaaaagagcaaaataattaaatatcctgctcttttctattaaccgtttagtaattttatttaatcgatttctttaccagatccagctctttgctaatttccaataattccttaattgcaatttctagattttgtcttgggtgctcttctaaggacttcttagtcgtactaattctctcggctatgttttctaaactttccatgttaattctccctttttctttattctaccattttactatactctatcatgccatatttttgcagaccatatcagactatgataaattaaaaaaatgtccaatttaagctacattaatttaaattaataataataactttcttgctctccatgataatatacttttgataaagaaatatacaaaaatctcttacgattacaattataacaaattcatcacattagtccaagataaaaaaatttttctctagtttataaaataaagcaattattagaataaaatgcatatttttcatttttaaaggttatatttagccaatatgtattacccttacacttagtaaatctttgattttaccatccctctttagtgcttttttcatattttggaaaacggttccatttacattactttaaggtataataaagccgtaaaaacaaggaggaaataaaatgttacacaaaaaactaaaaccattcccaagtgattttttatggggagcttcaacatctgcttatcaagtagaaggagctaacttaatcgatggaaaaggaccatcttgtcaggatgtcaaaaaagtacctgaaggaacttcagaacttgatgtgtgtgctgatcaatatcatcgttataaagaagatattgcattgatggcagaaatgggattcaagacttatcgtttctctatcgcttggacaagaattttacctaatggaactggtgaagtcaatccaaaaggaattgaatattataataatgttattaatgaatgtttaaaatacggtattgaaccattggtaacaatgttccattttgatatgccggctgctttagatgaaagaggaagctggggtaatccagaatcggttgactggtttgtaaactttgcaaaagttatgtatgaaaattatggtgatcgtgttaaatattggctaacgatcaacgaacaaaatatgctgactttagttggaccggtaattggtacattacacttgccggaaggatgcacaaacgaaatcaaagaaatctatcagcaaaaccatcatatgctggtagcacaagctaaagcaatggcattatgccacgaaatgattcctggagcaaaaatcggacctgcaccaaatatttcattagtttatcctgcttcttgtaaacctgaagatgttctagcagcacaaaactataatgctataagaaactggttatatttggatatggcggtttacggtgtatataataatttagtttgggcttacttagaagaacatgatgcctgcccaacatttgcacctggagatgctgaagcattgaaaaatggacatcctgattttattggtttcaactattacaatactgctacttgtgaagctagtgatggaactgaaacaatggatcctggagctgatcagcaaactgctcgtggtgaagccggattctatcgtggatttaaaaatcctaatttaccaactactgaatttggatgggaaattgatccaatgggattccgggcaacaatccgtgaaatgtactcacgttatcgtctgccaatgatcgttactgaaaatggactaggagcatatgataaattaacagaagacggtaaagtacatgatcaatatcgaattgaatatttaagaaaacatcttgaacaggtacaattagcaatcacagacggttgtgaaatgatgggatactgtccatggtcagcagtagacttgatttcaacacatgaaggtatggtcaaacgttatggatttatttatgtagaccgtgaagaatttgatttaaaaactttagatcgttatcgtaaagattcattctattggtacaaaaaagttattgccactaatggtgatgatttatcagattaatttaatcttaaaaagtcttctatagaaatctatagaaggcttttttgctaataaatatagtattataacagcatgttttctatttaatttaagtaaatttgctaatctacaatcttttcaaataccgggtcataactaactaattaattattgtttcaccttcttgttgcaattattttaacgcttcaatcacaatttatctattattctgatcaactgcctaagcctgctcacccaccaagatttcttcctctgaacatttaatatccttatatccttgtagtgtttgtttatataaagccatttttatttttccttctcatttcctttttcatattctaaagctaattttaaatcatattccattattttattttctattaaggcaaaactttgaaaaagcaactaatcatttccacttttctagcgaatagcttaactttttatcaaataaaataatattcccacttgttaatgaattcaatcattcctttaaaataggattcggatagatatatttaatgctgataatacagcaataaaaaaacaattcctctttatctatatctgaataatgagataaaaagcaagaaaaataacttttatttaatgaagacatcatgtttttaatactaaaattattattcctatataataataaaagaatcggctgtaaccaattcttttattctacatcttcttcatatttaataatttcaccagtatctgcattaatttctaattcatattccttattaccatttttaatctctatctcatattttttaattccatcatcgtcatcataatctaactctgtttttattaagtaaccaccaccaacacgatcaaaagcgattttttgagcttcctctaaagaaacagccgtattaacaggagtaatcggagtaactgttccatcaactggattggttgtcgtacctatataatcatcatctttttcccgttttaatacctttccactatttgcgtctacttctatttcatacttttctgtatcagttataatagtaaaatcatagtaagttaccccatcatctttatcttctttagccttaaggatttttccttctacttcttttaaagcaatttcttgagcttcttccaatgttagggcactaactttttcagtacatccaactaaagctattgtaattaatacaaataaaattattttcttcataaatattatctcctttcaaaatcaattgtaaaaattgtatattgatcaactatactttcaaccgtaattgcatagtcataatagctgcaaattcttttagcaattgctaaacctagtccaaaattgttattattttgagcccgtgactcatcagcccgataaaagcgattaaatatatagtctaatttatctgcttctatcccaatcccgtgatctttaaccattaatttttggtcaacatataataattcaattttcttttcttcttctcttgaatatttaattgcattatcaattaaaataattaaaagttgttttaaatgttctatgcgcatccatatctttgaagttacagttattttaataataaattcaaattctgggtgaacttctttaaaatttgtaattacttcatcaactactaaattaagatcagttggttcttcacaatgaatatccatttctcgggttaaatgaagaagttcattacacaattggattaatcgctcaacttcattactagtgacattaagtgaattgctaagaatagcaggatcatcttttccccaccgctccaacatatctaaatttccttttataattgccaatggcgtttttaattcatgtgatgcatcacttacaaattgattttgttgtaataatgatctttccgcttgatcgattgtttcattaaattccttgcctaataaagctaattcatcatttccctcaataaaaagccggtgacttaagccctcatttttaatttgtttaatactctttgtaaattgatcaacagtttgtaaaaaacgtttactaatcatgaaaccacaggcaatactggtaatcaatgcaacaataattaaaatcaaaaagattacagcaacaatactagctatgggggttatcaaatcttcatccattgcatagattcgtccaataatcaataaataataacccatataaagtaataaaatcaagctaaatactacgatcactgtcataataataattgaagtagtactaactaattgatgtcgtagtgatttaattttcatgataaacggtatcctactccacgtactgtttcaattttaattccgggaattttattacgtaaataacggatatatacttcaacgacatttgttgatacatcttcatcataaccccaaacctgatctaaaatcttattgcgactaacaacatcaccgccattttgaactaataatgataataaatcaaactcagtcgttgttaaatttacttcattatctttgaaaaagaccttgtgcttacttggatcaattttaacttctccataactatattcaagaagtgctttttgaaagttcattcttctcaatagtgcatttatcctcgctaataattcttccattgcaaacggctttgctaaataatcatctgctccaacttgtaaaccattgaccttatccatcacctcatcacgagctgtaagcataattactggcgtttgtttaatctctcgcaagcgtcgacatacttcgattccattaattcgcggtaacattaaatctaataagattaattcatattcttgctctaaagctttttttaacccaacttcaccatcataagcttgatcacaacaataacctgcatgggttaattctagctttaatagatctgacatatttttttcatcttcaattatcagtattgccatcttcatcactccttatattcaaatccaattatctttccactttttgcactaatatttatctcaatcagttcttgctgctgattctctatttcaagatggtaaaatatttgcatatgctcatattcaatttgtgaagatacgatagttcctggaaattgtttcaatgctacaacatgtgcttcacttttagaataattaatgttatttaaagttgtatgtaatatatagacaccaaaacaaataacactaatgacgattattattgtagttgttataatttgttttttataaataatcagcttttccattcccatcttcctttcatctatatcataacctattttgcccgattgttgcttaaagaacaataataattaaataagaattttctcattttctaaaaataaataagtgtgatctaaaatcacacttactcaaataaagcaaattctaaataataaactagatcatgaaacattctagtattaaagccataacagctgcaatcatctatttctccatcccaatcattatttaatcgttctaataacagcggtacctctgtaacatctaaattagctgttacaaaaaactcactacaatctttttttccagcatactcacgactcggtgaaattgaaaaattaggatttatttgtaacaacaaatctttaatcatttgataatcttttatatcttcactttcaataattacatataatctcgctaacatataaccacctctttcctgcctattttatcataaaatattgtttagataaaagtatgctattaattaattttattctgattatatttactaataaatatgttaagataaagtaaagagatatatttgaaagctgggataattatggatgaatcactaattacgatcattgggtttattattggaggcctatctatctttatttatggaatcaatcttatgagcgatggcctcaaaagtattgcaggatatcatatccgtgagtatattgaaaaatatacaagtaatctttttacctcaattttagtgggtactttaatttctgcaatcctccattctagttctgctgttacagttatttcaatcagtctggttcgggccggattaatgaagttggaacaggctataggaatcacgattggagcgaatattgggacttgtgtgacttcaataatgataggcttgaatgtggaacaatttgcttactatcttgtctttattggggttgtaatcatgtttttagctaaaaaaaagacgattggatacatcggcaaagttgttctgggctttggactaatttttgttggtctacaaataatgagtgatcaaatgatagcctttgctaaagaaccttggtttacaagtatcatgacaacgttaggaaaaaaaccatggtgggcacttctaggtggaactatagcaacaggcatcatgcaatcatctactgctgttatcggtgtagtccaaaaactttttacaactggttcaatcactcctgctgctggtgctgcatttatttttggggccaacattggtacttgtattactgcggttattgccgctttaggcggatctatttcaactaaacgagctgcctggtttcatgttgtttataatctagcaggtgcaataataggaatgctcgttttaaaaccattcgttaatttaactaattgggtcaatttgctgctaaacggcagtcaagaaatgtatattgctcaagcacacttcatttttaatatagcttcaactattttagttattccttttgttcgctattgtgttattttattagaaaagttaattcctgggaatgatcatcatgatacgctcattgaaaatatcgatgagctagatgatactttaattgacaaacttcctgtcggagcattagcagttgctaaaaagaatacactccgaatgggacgaaatgttatagccaatattaaattatcttatacttatttaatctctaaaaatagtgaagattatgatgaaattatcgaaattgaagcactaatagataaatatgattctcgtttatccaaatacttgttaaaaattgctcaacagcccacattagcaaaaaagcaaactaatgaatactttaaaaattatcaaattatcaaaaatcttgaacgaattggtgacattgttagtaatttagctaattattacaaacttgtttacgatgaaaaaggtaaattttctaacgaagcaatcgatgatttaaataaaatgtataaattagctttagaaatggtccaagatgctctagatatttatgaacacgataatgcaaataaacttctttcttctttaaacaaaaaagaacatactttaaatgctttagaaattgagtgtcgtcaaaatcatctagtccgaatgcgtgacggtatttgtgaagataatatcgctgcttctatcatcattgatattatttctagtattgaacgaattggtgatattgctttaaatactgcaaattcaacaattacggtatacaaagatcataaagttaaatatttaaatgtttgatttttacataaaaaattactggaataatatccagtaattttaatttattgcatctttatcggtttcaccggttctaattcgcaaagcactttttagatcataactaattattttgccatctccaggattccccgtaaatgctgcggtttgaattgccttaattgtcttcttttcccaaacttcatcacttactataatttcaaatttaatttttggtaacatatttatttctacttcattacctctaattacttcacgatagcctttttgaattccacaccccataacttgataaactgtaatcccatgaacttcaattttagctaaagcttctttaacatcctcaaacttatcttcacgaacaaatgcttctattttaatcacaaatcactcctccttactctaatccattaaatgatgggtatgctgtctcattatgttcagacatatctaaccccatctgttcatcacgtttatcaactcgtaatggtgtaaatagccgtacaactcctatacaaattaaagtacctatcacagcaactactattgttagtaaaatgctaataatttgtgcaattaataagtttgtatctccaaagaataacccattccatctagctacatcattgattgaagtttgagcaaaaagccccgttgcaataccaccccagataccacctattccatgacatccaaatgcatctagagcatcatcatatccaaaatattgttttgctttagaaatcataaaatagcaaattgggctaccaacaaaaccaataataactgcagaccaaatcggaacaaatcctgcaccaggagtaattgctacaagcccgacaactaggccggttacacttcccactaaagttggtttattaattttccaaacatccatcaacatccatgataacattcctgaagcagcagcaacagcagttgtcataaaagcgtgtattgctaatccgtcagcttttaaagaacttccggcattaaaaccaaaccacccaaataatagaaggcttgcacctagtacaacaaacggaatattatgaatacgatatttcgcatgatcataatccttacgtttacccaagataatacacaatactagcgcgcttactccagaactaatatgaacaacatttccaccagcaaaatctactgaaccaatttcagccaagaatccccctaatccccagaccatgtgagccataggataatagacgattgttgaccagacaattataaaaataaacaacgctttaaacttcattcttcccgctacagcgccagtaattaaagctggtgtaataattgcaaacatcatttgaaatgctgcaaagcctaaatccggaatcgtactggcataattacctggcgtcgttcctacattactcaagcccaaaaagcttagatccccaattattcctagatgatcatttccaaacgccaaggaatatccaaataatatccacataaccattgctattccaattacaaaaattgaagtcatcatcgtattaaccacattttttcttctaaccattccgccatagaaaaaagctaatcctggtgtcatcaataacaccaatgctgtacagattatcataaatcctgtatctccagaatcaatcatatttcttccccctttatttatgattatattggaagtatagatgatattttttttattaagcaagatattttttatcactaattattttcagtttaccttgtcgtaaaaaaacattgatattatcatagttttttaatttgttaaaatattgttatttttatatatgataaaaatagttattggcatataagtttccaattaactcgttattgtatattagtgcagttattattaattcatttaagttagaaaactatagatcattacaagataaaattaaataattgtcatttttaaactgtttttccataaccaacatagaatgattcacaaaattatttttaaagtattcttttgaaattaaaatcactcctataaaagttatacctgtgactattaatcatatatataaatcatttggcacagctctaattggaactgctccaattacaaagtaaaacaatatatatataattagtatcttagataaaatacttaatccttttatctttttatttaaaataaactatataaaaatcatagcatatctattttataaaaaaggcataattttttcacaaaactaaaaagagctgtaacattctaaaatagtaaaaaaaactactcactagttacggctacttctataagtatatcttatttccaaattacactgctattatgtttatctccttctttacttggttctatagctatcaatctattaacttttttgcacaagtgggacatgcaacataaaagtaagtacatccgttttcacatttataatctattattttaaaactactaacttcagtatcaatgctctctttagttactatctttttcattattttcccgtcaaaagagatataaaacaaaaactatatcacttttttatgccttacgttaatattaatcaaaaaataattatacgatattttgttctattacattaataatattgtatctattttttatcgtagcaagataaattttgtagtatattcttgttttcgtaattttcctaaaataatatatttgctaattattcaagaacttttctatatcttcataattagatatttctatattaaaaacatatgaaaaaaatttttgcaattcacatatatcatattctttaaaatttattttatgtatcttttgatacacttcttttactaaaaatcttaaatctgaaatataattacaacatactaaatcaacaacatctttaaaaatatctctatgcataataacctatcccctcaagctttattcacaaacattttaaatataaatactgaattaaaaaatacatcaatcaaataaaccaaaataactctccaaaatttcaatacaatatacaagtaaatacctttttaatatcatattaaatttttaataatattttttcccaaaaatatatcctatatcaataaaatttgggaacaatttaatcacataattatcatattatatagttgtaaaaactataaatagcttaagttctgttgtaggtggtgaattatgcttgactattttttagaaaacactacaaaaaagaaattatatcttttttccatcttatatttaaagagagtcacttctgtaaaagaatgtaagtatatacttacatttagcagtaccagtataatttcaataattaacgagttgaattttgatttcaatggaattgcagaaataaatataacaaattcattggaacttaaattaattgtatacgaagatattacattttctgatttactccatgctatataccaaagctctaatgtattgcattgtatcaagtttatgataaccaatgaatcaaaccattcttttttggtatttgcggaagataactatcttgcaaaatccagtgcatatcgaatacgacaaaaatgtattaaatatatccgcagtatcggtttggatattaaaaaaaataaagttataggggaagaatacagaattcgatttttgattgctcttttatactacaaatgcggtatagattgttgcgatattgatgaatattcaataaaacttattaaagaatttattatatctactaaccagtcaattacttttgaatttcttaataacgctacaaatgaatatgattattttgaatgtctaatgtcacttttgtggaaaagaaaagaccacaatgacaatttatctataccaaaggagcttgaaaaatttaaagagatttttatatacaatgatttgaaaaaatatttacataatgtaattgggaatcagcttaacatagatttttcaaaaaaagactatgattatatgtatttagtttatttttgtactaataactttctttttgccaaccagtggacagaggaacgtaaagagcacatttataaaatatttctttccaatcaaaaattttatgatttatatattcgtcttagtcataaatatggtaaatttctagaacaatctcacattttcaaaacaattttaatctatttttttaaggatcatctttttcaattacaatgcctaattccaaatcagcgtctatatatagatactacacctactacaacttacatcaccaataatgacgtatcaggtatcataaattcatggaaaaaggcaaataatatattatatccaacagataaaagaagtatattctatttaacaacacaaattgaatttatattaagacaacttgttccacctgtaacaatcatattgttatctgatttaatgtccgagatagaaatgataaatctttttcttgaaaaaaatttttcccgcaatcgaattaatataactccgttacttttaaacagttataatttagaatatctgaacgctgaaaaaaatagaataataatcattactcgaggaattgaatatttattaaaatcatacaatttctttcaaaataatactatagtaataatagattctagaacaaccttatacgagaaagaaaaaatttcgaatgctattgccaattatgaagaaaaacaatttctaaaaatttgtgctggaacaagtcttactgatacagaatattaatgatcaacataagtgcaacagtctatttatacaaatattatattatttaaatagcatattttatcttaaacttatttcttggcaaaaacacttaaatcaaaaaaggactgtaacgaataaaaattttaatctttgacatccccccttctaagtgacaattttttattatttcacttgtctacctagaaggaagcatatcatttaatccgttacagcccctttaatcatatactaattcatcttgatttataacctcttcatcagtaaaatatgcttgagtttgtactatgacctcttttcttaatccaattaaaccaattaaattagggatagccatacaaccattaacaatatctgcgagaataaaaataaattctaatgacataaaaggaccaattgcaataaagacaatataaataaatttataatatggaatcgcttttaaaccttttaaataatacatacatctctcaccataataattccaaccaattatagtagtaaatgcaaagaaaattaatccaatattaacaatatacttcccaatcataggaataaataaaccattactaaatgcttgtgtagtcattgcggcaccttctaaaccactagtatggctattagtaagtaaaattgcaattcctgtcatggtacaaataacaactgtatcaataaacgttccagtcattgataccaatccttgttctacacatgaatcagtttttgctgcagcagcggcaattggtgcacttccaagaccactttcatttgaaaaaattcctctactaattcctttttgcattgccattgtcatagtaatacctataccaccaccaagagctgcttgaggattaaatgcactatgaaccactaatacaactgtctgcgggattaagttaaaatgagtaattaaaataatcacaacaccaccgatgtaaagaatacacatcataggaattactttttctgctacattcgcaattcttttaatcccgccaattgtaataaaacctacagtgatcgttaataaaaccgctgtaacaattggtggaacattaaacgataactccattgcatcagaaattgatttaacttgagtaaatgttccaattcccaataacgccacagcaactccaaaaaaagcaaaaatcttagctaaccatttacttcctaaaccccgttctaaataatacattggtccccctgccatttgattattttcatctttgatacggtaacgaattgctaataagccttcagcatattttgtagccattccaaaaaaagctgatacccacatccaaaataatgctcctggtcctccggccgcaatcgcggtagctactccaacaatatttcctgtcccgatcgtagaagatagtgctgtacaaagagcctgaaaacttgatacatcaccttcatcattatcctgttttttaaaaatacatgaaaacgctaatttcaatttcgttaattgcaacagttttagcttgcatgtgaaataaattccagttcccaacaatagacaaataagcggtaagccccatacaagctcatcaatttttgtaagtaaatttgtaataaattgcataaaaaaactccttcttaaaataattaagtcggaattaataatgaaaaaactattcatcccactgtccttttacctgagagtttcacctataaataggtttgctccttcggtgcttaatttaataagtctctccagaggttcgtccaatagcgatccttttacctgaaatctttaattcttcggtgttcaattagaatctctttcgccattatcatccgatatatacactaagattatacgctaattgtatacaattgcaaatattttttatttttgcaataaagtatttgtaaaaacgacatttctcttctataataacaattatgaaaaaattaaaatattttattcctgccctaatttggatgatctttatttttataatgtcacacactaatggtaatgactcttcaaatcaaagtaattttattgctgaaataattttaaaagttattaatattgatcgtgatacattaacttttataattagaaaagccgctcatatgagtgaatatgcaatcttattactcttactttattatgcactaagtaacgttatatctaagcatactttatcattatcattattagtcacatttatttatgcttgtagtgatgaatttcatcaattgtttattccagggcgcagtggacaatttaaagatgttctaattgacacttctggtgccttgatcatgcttatgatcatctttttatggcaaagaaaaaagaagtctaaacttatcaaataactttacttaagttattttgattaatcattagacttcttttcattttgcagtttttcaatactttcttttaacttatcaatggcatcattaagtacatcaagatcattttgatgatcatcgttgtcatcatcactcggtggcgttgagcgttcttctaagacagctgaccaagaagagtttgaggctaaaatatcacctacaacattaaaccatgctcccaaagcagcttgctcactcgtagtaaaatcatttgtcaatagatatcctaagatcactgcagttccagtaaaactatacggatcaagattgggtatatacatggttcacctctcccatattttaatatatgctaaataaaaaaaaaacttaggcttttgcatatttaatatttcgctgcacacactattattgggtgaaaaaatgaatgataatgtaaaattattaaactttatttatcaaaactcgcaaatgggagttgaaacgattgagcaattagaaaaaatcgttgaagataaagactttaaaagatatttaaaagaaaaatatgaaggctattgtaaaatccataaagatgctaaagaaaagttaaatagtcatggatatgacgaaagaggaattggttcttttgaaaaaattcgtacttacttaatgatcaatatgcaaacactgaccgataaatcaactagtcatattgcagaaatgatgatgattggaagtacgatgggaatcatcaatgcaattcgtaatatagctgattacaatcatgctaaaaaagatattattaagctcatggaaacattaaaagctttcgaagaaaaatcatatggagatttgcaaaaatttatttaaattgctgttaatgcagtgctctcctaagttcaactttgtgagggcactacatatgaggtatattatttctaattaaaaacagtattacaaataatactgtttactatcactaattataatcaattaaaccaaatttcttaaacactggtttttgcaatttcataaaaatccccatcattggaccaaataaaaacattccaataatagttccctctcgtactgctaaaggcacatcagtaataattacaattataattactaataaaattgaaactacgtcaaccccttgccgtaaaacatggaatttctttccagtaactccgctaacagccatacaagctccttccaaagcaaatgtaacaatatctagaaccattaccattcctactgcaaaagcactgacgatatatcccaaaattaataatccaacattcatccaatatgtattaatcgtaaaattactgtatacttcatacaacatgaagttaacaattagccctaataagatgcaaacaggaatttgtaatagctggatcggcttaaattttcttctaagtattgccacttgaacaaagatacataaaaaattacaaaacataccaattgttcctacctctatccctgtaactaaactccctgtctgtgccaaagcatcccatgcacctactccaatggccgctttcaaagttagagctgaactacatgcaacgaccacaacgccaaacaccaaaactattacccgcttaaacattttaattagtacctcgctttttttgtataggcattattatagcggtttcaataatctagtcaacctattttttaagcgttttcaaaaatagaaaaagggtaatctacccttttaaaataactctacttcttgtatgagtgcaattagctcgcttaagttattaattacataatcagcaccagcatctaaatatgcttctttaacccgttcaattgcacgattccgttctttaggtgttaaagcattaaattcttcttcgttcaatcccaaagttgaacttccctcaatgacaccaactacgattacccctgcattaacaccttcttgaatatcagaaattgtatcaccaactttgattacattttttacactgcttatatgcagttcaatcatatttttaaaaatcatataaggataagggcgtccaaagtgattagtagcatcaggtgagtaccagcaatcaggttgatacccctgctccttggcactttttaatactggctccatcatcatatctgtatatccagtagttgagccaatcttaattcccaattctcttagttttgccacagtttctaaaacatacggcttaacatctgtatgttttgtaatacctgtcattaatgatgcctcaaataaatcataaattttatgtatatcctgttcattaaattcacgatcatatctagccttaaatgcttcattcaatactggcatttctaacattgttttaatatgatcaatcttcaacatccccattggttctctaatttggtcattagttggctctaatccataattattaaaagcatctttaaatgcttgaacaggagcaaaacaaccataatcaactgtagttcctgcccaatcgaaaattactgcttcaattctactcattatgctacctccgctaaaaaatctttaataattgaacataaatttaatatatctgcttcataaatttcaccaatattaccaattctgaatgtttgagcagtagttaactttcctggataaattgcataaccacgtgcttttatataatcatacatctcactaaaagcaaattcttttccttcaggataatagaaagtagtaataattggtccttgataagctaaatcaacatagcttttcattcccatttcagccattttttcaattagcaaacgattattatcataataacgtttacttcgagcagctattccaccttcttccaacatctcatctaacgcttttgaaaatgccagtacgacatgggttggtgaagtaaaacgccattttccatctttatccatcgtttcccattgatcatataaatccaatgataaacttcttgctttacctcgactagctagtaataaatttttattagcaatcacaaatgaaaaaccaggaactccttgaatacacttgtttgcgctacttataataaaatcaatccctaattttcctacctcaatatcaacaccaccaaaactactcatagcatcaacgataaatactttatttctttctttaactacttttgctacactctcaatatcatttaagatcccagatgttgtctcactatgaacgatagcaacatgagttatttctttttcttcatctaatttttcagcaacagctactgcactaggattttcattttcagcaaactcaattatctcatgattaattcttgcgtgctcacatatatctttcattctttttccataagcaccattagcgacaatcaacagtttttcattttcgccaattacacttgtaattactgactctactccaaaagtcccgcttccttgcatcagtactacagtatattgctcagctcttacatgagctaattctaataattggtccctaatttttaaagtaatttttttatagtcatcatcccatgtacaatgatcaaataacatttcttgctttactgttgctgttgttgttaacggccctggtgttaataatttataatctttcattttcttctcctacttacattcttctgataatttttgatgtttttctaataattcggcagtcaatttttcactaaaagtttttggatatgctgacttatttgcactatcactagtttctccttggtaaaggggattagggtaggtttctaacagctctttacgtccactttcaataatacattgtgccatcttcattgctaatttttgatgttcactaccatctttatttacgactgcaactgattcagtcaaactaaaatttccctctgttgggtcaacaaaatcgattggaagtccatcagctttatcacgtaccgcctgatgacgtagaccaaagccaatcgctacttctccagctcgaacttttttaattgggcctgatcctgaatcttcgatatgtgctccggcattatcataaattccttttaatacttcctttgctccatcttcgccatattcacttactaatgcctgaattaataaccatgctgttgatgaagatgctatatccgtaactgagatcatatctttgtattctggcttagctaaatcttttaaacaggttggtgtttcaagactatttgcttttaattcttcagtattaataataatagccccttcttgtgaagtaatcggtgtgtaataagatggatattcatctaatgcttgagtatcaaaatctaaatcaacaaacatctttttttgttcttgagcactatcaagataaaacgagctcattgttactagatctgcctcaatattagttccttcagccaataacttacctcctaattcagaggttccaaaagtctgaaataaatactgtccctcataaccatttttatctaatgcatttttcattgccgttacagcttcatcatcggcatttgaataaataacaacctgatcatttgatgaagaacatccagttaaaagtgaagcacaaagtaacgaactaactactaacccctttaataatttctttttcattttaatgttttcctttctcttctttgcttactaaagtaactaaatactcctttagctaataaattaattaataaaatcaagattgataaaacaaagatttcattaaatttagcaaaatgctgtaactctttgatctttgtcgtcatcaccatcgtccgcgccccagcaataaagataaccgcactaacagtgaccatagcattaataaaataataactaaatacttctaaaattgatgaaattgcattaggtgtaataactctaataaccgttttaaaccagctatcacccatcagtttcgcagtcgtttcaaatgaaccattcatctttgtcaatgagtttttcatcattaaatatggcgatgaaaagaaatgaacgatattacacaaaataatgatgatataagtattttggagcactgtcccagagaacattaacaagtatgctatccctaataccataccaggaatagtattagtagctagagcaatactttcaattatctttttcaaaaatttatttaaagtgctccgggcactagccagcgctgctccatatacgacaagtgttcctagtaatgctgtaaagattgcagtgattaatgaattttttattacccctagcaatgttgcatcactaaaaacattaataacattttgaaaagtaaaactaattcgatatggccactctccaacaaacggcacaattataattactataaagacagcaataataattacattaatcgttatgctcagtgtcccccaaaaccaatcacgaaaacgattctgtttgatttcaatcgtagagattttattataacgaatattatatttttcaagccgatgcaataaaataatactgatgattgaaggaatcagcattgtcattgcaacaactgccccacctgcaaaatttggaatacttcccaacatcttattgtaaagtacactagcaacaacatcatactttccacccaccgatgcaggaatcccaaaatctgtaaaacttagaaaaaatgactgaataaaggctgcaaccaaagttcctaataaaggtcgaatcaaagtaatcattaatgtcctaaattcactatctttcattaatttggaaacaataataaattttttatcaatgtaactaatagcgttattaattaacataaaagcaatcggaaaagtatatataacataccctagcatcaatcccttaaaaccatatatatcaaataattgaaaaccaaataactttgtccacaacccttgttttccaaacgaatagataattgcaaatccataagtaatggtcggcaacaacattggcagcatcgaaacattattaattatccttttcaaccctttaaatatattcgtataatttaaagtgtaagcaacaataaataccagtattactgttactagagcactcactccagaaacaacaaaactattttttaaagcatgcataaatcctgttgtttgataagtttgtaaataattatttaacgttaaacctccattattatagaaggattgtattaacagtgacccaattggtaataacagaaatatcccaaaaacagcaataacaattatataaataaacttgatttctcgatttttattcatttctttataccaccggactaaacaaagtcataatatttcttctttttatttccagctgatttaaaatgaagtcttgaacaaaatcacaacttggatgattaataatttcctctggtttaccaaactgagatatttttccttcattaataatcaaaacttgatctgataatgttaatgcttcctctggatcatgagtaacaataatagtagttaaattgtactccttagcaataatcttaattcgctctttaatagattccttgattactccatccaaagcgcttaacggttcatctaaaagaagaatcttaggtttcattaccattgttcgagccaatgcaacccgttgtttttgtcctcctgataattgatcaatctttttatctaaatgcttctccaatcctaacaagtgtatcagctcatctacttcttctttagttgaaatatccggtttgttctttaaaccatacgttatattttcataggcatttaaattaggaaacaaagcataatcttgaaagacaatattaaagcctcttttttccattggaacataagttaaatcctcattttcaaaaataattcgtccactatcaacctcactaattcctaaaataagatttaataaagtagttttcccacttcctgaaggtcctaaaattgaaacaatttgccccttaggtatctccaaactaagattatttaaaatatttataccatcaaatgacttaacgatcctttctagttttaacattctttttcctcctcgaacaactgcattatagctaactaaataaatttctatctattcttttttctttaaaacttggttaagaaagcgttaataaaaagaggtggtagatgtagaaaaactacattcacagctcctctttttgatatccacgatgtttaattaatctactatagtgatctagttttttagtgtaattatcataatcactgataatcacacccatatagatcatatcgactaatgcaatttgagcagttcgtgaaaaaattgcatctccatacaaaaactgatcattacttgttgataaaacaatatcaccatatcgagttaacatggtattttcaaaattaacaatagcaatcgtttgagctccagcatctttagcaatcttcaagacttcgactgtatttttagaatttcctgaataagatattccaatcgctaaactatctcttgtcagattacttgcatcaatactttggagatagtaatcactatgacaagtaacactctttcctaaatatattaatttagtcattaaatcatgagctacacccattgaattctcaacagcatatattgaaatatgctgactttgattaattaaagctacggttttttgataattcactaaagaaagagattttaatgcattttccagcatcgatgttgctgtagctacaattttacctggaagatccataattttatcatcggcgtttattgaaaaaccatataaaatatctatattattttctttatcataatttttagctaactctaatttaaattgtttgaaactgtcatagcctatcgctttaacaaaacgcattacagttggctgcgatacagcaacttctttggccaataacgtcattgataaatcttctagctttccacaataatttaatatataatcagctacctttttttctgatggacgtaaaatattgtatattgtttttatcctaaaattcactttgcttagcatattctctcctgtagtatttctactttattttctctttttatttatttttagtataagcaatattaaaaaaagctactatcatgctagctttttttatctaaagaaaaagtaatttttttgttaagaaaagaaaaaaccagatttttatctggtttttagattactaaggaataattattcctcgcgggttatcaagattatattctttagcgagcttaggaaaatgattatcaaggtatttttctaatgctgtatcatccaaacctttagtaagaatgtcttttatttttaaaggatcattaattgtaattcctttacttgataatatctctatgatagaaacaatattttttaaactataagcctcaatcattatttttccatcatctaaaatgatatctagatccacataataattaagatgttgtccgactgctaaggtactaccataagtccaccttttaattattaatttttcaagattagactccacaattcctggattatataagcgtgaacacatcgatacgttaatctctttgatttcatcgaatgtaatctttctaattttattatcaagtcttaagattaattcttccccaatcaaaagatactcctcttgttgatcacctagctggtcaacatacacatttaatcgagcacgttcactttcctcataattaataactcgactaattttgttcagaacatcgcgtttcattattatcccccctttacacttttattaaacactatggtctaaaacaatagtcaagaaattctattcaaatatttattaattcaataaatactaattttataaaacgctatttagtatcgaatatatatactccatagattcttttaattaatgttttcttttcatcgaaactagaattgctagactaggtactaagaccaatctatatataataatatcatcacctgtagcaattaatcttttgatcgttgaaatagcatttttagcaggatctatcgtttttagcataagtaaaccaaattgggaaagctttaatactttcaatctgttcatcagtaattacactatcttcatacacttcgcaaattgggaaagctatggcaaaataatctgggtgttttaaaatcatttccattgtcatataattaccatttgaacagcctcaaataataattcactaacatgctccaaatgactcatcagcataaatagaattaccaacttgataattattattgcctccatcctcattgttgaactttgtagcactaaaatatattatatagataaaaaaatcctttgagatataaatcccaaaggaaatattattaaattccaaataataaatctaaatatgttggcattggccaatattcagcatcaatagattcttcaagctgatcaactgtttctctcaatgcttgcatcattgcaaaaacatcatcgcgccatgcaactgcctgttcaaaaatttcttcttcagaagcttgagctgcagcaatattagtttctaaagttgtcatttgttctttcattgtcttcactaatttagctaaagcattagcatcatcaactaagaaatcaacatctaaacctgcttccttagcagcaatcacttcagaagatacttttgataaataatcacaaactgctggataaatttgagatttggccatttttaacgctgttaacccctcaacctgaatagttttaatatagttttctagtaatatctcataacgagatcctaattcaactctactataaacccctaaacgatctaacatctctaaattcttttcttctttcaaacattttaaagcatcaacagtatttttattattaggaagtccacgttttgctgcttcttcttcccattctgctgaatatccatcgccattaaaaataattcgtttatgagctaaaacaaattctttaactacatcttcaaatgatttgcctgattcaatttcatcagccattttttccattgcgtcagctaaaattgcatttaaaatagtatttggtccagcaacagattggcttgaaccaactgctctaaattcaaacttatttccagtaaacgcaaatggtgatgtacgattacggtctgtattgtcttttgagaaagttggtactactgatactccagtggcaaaacgtgccgcatcagatttgctagttttcttaccttcacaaatttctgctaaaagagcatctaactcttcccctaagaacatagaaataattgcaggtggtgcttcatttgctcctaaacggtgatcgtttccagcactggcaatactcatccgtaataaatcagcataatcatcaacagctttaatcgtacatgcaagcgttgcaataaatggtttattttcagcaggattagcacctggattgaataaattaatacctgtattagtaatgactgaccagttatcatgtttaccagaaccatttaccccagcaaatggcttttcatgtaataagcagcgtaaaccatgctttttagcaatatcttgcataatttgcattaataaatggttattatcagtagtaatatttacttttgaatatacgcatgctacttcatgttgtgccggtgcaacttcattatgttttgtttttgaaggaattccatatttccataattcatgatctaaatctttcataaaggcagacactttacgtttaagactaccaaagtaatgatcttctaattcttgtcctttcggcgccattgccccaaatagagtacgtccagttaactttaaatccattctttcttggtaatatttatcatcaactaagaaatattcttgttcagccccaacagatgcagtaactttagtaattcctttttcaccaagcaaaggcaataatcgacatgcagctttagataatgcatcacaagatcgtaacaacggtgtctttttatctaatgcttctccagtatatgaacaaaacaaagttggaatatataaagatccatctttaacaaatgccggtgatgtacaatcccatgcagtatagcctctcgcttcaaatgttgcccgtaatcctccagacgggaaagacgatgcatcaggttcaccttttcttaatgtttttccactaaattctaatactgctttacaaccgtcaggttccaaaaaagcatcatgtttttcagctgtcaaaccagtcattggcataaaccaatgggtaaaatgtgttgcaccattttctaatgcccagattttcattgcattagcaattactgttgcgcattctttagataattcttcaccattatctaaagactcatggaatgccttgtaaatagatttaggaatccgttctttcattacatcatcactaaatgccaagcatccgtaatcttctaataacttattcatttccattctaagttcccccttgttagtttctaaacaacacataaccatacacttaatatatgtttatatgccgttattatacagttactttatttaggtgtcaatatctatatgatatttttttatcattttgttaattctttattaaaatgataaattatttataactgtttacttaaagatacttattacaactaagtaatattccatttttacaaaagaaaaagatgcttattcagcatccatatttgcttttttagcttcttctttcaaagctcttttgcgtttcttttcatatgatctatgagtagctgcatattcagtacattgcacatgaattcttttattagcagctacaatcgcttcaataaatcccattctatcttttggtgttacaacaaatctttttttattttcagcataaatttctaatgcccgtggactagttataagttttgtcatctttggtacaggatcacaaattgtttcacatgtcataatattaatttctttatctttaccaacacggcgattaattatcaatgttctacgattaattgtatatttatatggtcgccataaagaaaaatatgcaataattaataatccacaaatagcacacactatcgcaggtaccatttgtccaattataaataaataaactacatataccatataaaagatttcaaagtatagtattgcgggattcaatttaattttaaactctttttctttcataataacctctctttttcctcaacttcatcattataacgtatcttaaatactataacaattataaattatcaatcattgataacttatagttactatattattaaataaagaaagacgggaaacccgtctttcgattatcaaacaagtttgttgaattattctgcagcttctgcagcttgtttgttttgatatctttcataagcaattaagaatggtacgtatactaagatagatactacgattgcaattgcttgagatacagcacccatgatattagctcctgtagttaagaaaccatgtaagataggtggtgttgtccaaggtgtattgattacagcttttggacagaatccaattacagttaagatataacctactgctaaagtagcaattggtgcgaatacaaatggaatacctaagattgggtttaataccattgggataccaaatgtaactgtttcattgatgttgaataaacctggtactaatgagatacctgcgattgtacggttatcttcacgttttgagaaaatcatgattgcgattactaaaccgattgtaaccccagaaccaccaaattcaccgaacatttgtaaccatgccattgcgaaaatgtgtaattcatcgctttttgcatcatttgttttagagaatgtttcgatattttctaacattaatggtgtaaataatgcttcttttactgcagataacatgttgttaccatgaatacctactaaccagaataacatgataatgatgtaaatgataattacaccaggaactgtagcaccgatagcacctaaaggtccttggatataagttgaaattacgtcatttaaatataatccagtagctaattcacatccacgtccaattaacgcaatgattgctaaagtaattacagctggaattaaaacttcgaatgcacgagcaacacctggaggtactgtttcaggcatttttaattttaatccttctactttacgtaatgcacagaagatttctactgaaacaaccccaacgatcatccctgtaaataaacctgttgctcctaaagcaccaccagcaacacctgtaaatgtttgtaatgctccatcagctgttaatgataaagtttgtttagcagtatctactaatgcatagttagcccatccactttgagttactgataaccaacaagcaagtcctaataaacctgcgaagtatccagtttcaccatttgattccccgatttcttgagcgataccaaaagtgattccaactgtgatacaagaaattgttgcgaattgcattgctgcaaacgctgggttaattacttctaaagccatgataggttcccagaacatacctaaccctgaatctgcattaactaatacgttacaccataaaaccccgatcgcacctgcgatagtcaaaggcatgaatgtttggaacgaattcttaattgcagataaatacttgttttgcccacaccacgcaccaacgcggccaaggacatctgccattttgtccatatttttttcctcccttaaaatatctattgacactattagtataaaatttaaactggtaaaagtcaatgctttttactttcaaaagtaccatacttttaaaaataaaaccggtattgtcctaaaaaacgttggtatatagccatttttcactaaaccgcttacaaaaaatttttttataattttttacaaaaaaataaaaacgcttacaaaaataagcgctttacattgctacagtaacagtttggagctcaaaatcattgtaatggaaacgtgaaaatgagtattcaaagatcacaccactactcaaataagctacttgttcaacttcaaaatatggctctgtttcttttaaacctagataatcctgttcaagctgtgatgacaaatgaccacgaacagttttatgagcactttgaatttttagctttaaatcattttcaatatactgataaattgatgtcttcaaatgatcaacctttaaattaggaataattgagattggcatataaattatttctaatgaatacggcttatcatctagtttgcggaatctaatgatatgatacacaaacgaaccctcttctatttgcaattttttcgatatcgtctcatcacttggaataacttcgaaagcaataatctcactatcaattttctttatccccgcaaaacgttctgttaatcctttggtaaaataattagatttattaggactctccatcgaaggattataatctttaacaaaggttccagcccctcgacgtcttacaatcaatccttctttaactaaaatatctagtgcttttttcattgtttctttattacaatggtacgttacacacaatacatattcatacgggagtttttgtccataggtgtatttctcttctattatcttggatctaatatcatcagcaatatcgatgtattttaccatggctacccctcctctatctagctctctttaaaaataccatacttttaataaatttgcacggactttttttagatataaaaaaccattaaattaaatgtatatttttctcaaaatgaaaaagcctcttatcgagactttttcactattattattttgcatcaataactttaatagctgcttctaatactttttctccattcatcattccataatctctcatttcaattacttcaattggagtttctgttttagttctaagaccttttaattcatgacgtacttgtggacctaacatcaccacatcccaatcatccatcttagataatgcatcggtaattggcaatgcgataatttctgcttcgattcctttttcagttgcggccttttccatccgttgaacaagcatactagtagacattcccgcattacatactaatagtatcttatacatcttatttcctcctttcctttaacgtccttctatattatatattataacactttaatctttttattcgaataatatgataactatttactaagacaatttattacaaatattttttactcccaagaatataaaaaatcgcaattattgcgattttctaaaatcaatctttttaactaccgtttgatcaaaatctttaatcataaaagtatccttttcataaataccatagctattctttccctctttaggcaaagaaatcgacgaaggattaataatatagataccattaatttccttagcaaccggtttatgaatatgaccatacacaaaaatatcaccatcattcaagcctggtaaattatcctcatcaaataaatgaccatgcgttaaaaagaaatgatgtccatctacatcaacagttgcaaaatcactacggatcggaaaatccaaaaccatttgatcaacttcagcatcacaattcccacgaactgcgataatatctttcttgtaagcattcaatagcgaaataacttttttaggagcatattcttcaggtaaatcattacgaggcccatgatataaaatatctcctaaaataattagtttatctgctttttcctgcttatatgtatcaattgctttttgagcatacaaagatgaaccgtgaatatcagaaataaacattaatttcatagaaaaacctcctctactggatatcgtacaattgtcttcaaatcttctggcgctactttttcaggtttatttaaatatatctcatgatgaaaaccacttaacttaagattcgccaccgttatgtattccatgatctgtttagttgaattgatttccgtattataaggtccaatgtgcagcatttgaatacatttaccttcttcaaactctttaagatatacgtctaatgctaaacaattacccgttttcgtcaacacttcattcttcacttcttcaagaatatgatcagttaaaatcggtggctgtggcatcattagtgtatatttaatcatttttttacgtgtaacatcaaaatggctattatcataggtgtcccaaataccttctaactttgaaccactaaatacaatctcttgctgacaataatattcttttaaagccttattaaattcaaataataattttgatttatttttaaattccggcactgtcggattcccaattccatctattgcaatatatttgatcatcggaatagttaaactacttatctttttagttgttgctcgatataattttggatattctttttttatatcaaattttgccattacatcatctccctgctctaactattatattacttttaaaaaaaattactatcgaaaattagaaagaacacattaaggtgttagtagacaaaaaataattacgatatactttatttaaagaaatacattaaaaacaaatgcaaaaagtataaatctttatataataatacaaatgataactttcatataatattattgtttttctcataatttgatttatctagtatcaataatatcgaaaaagaaaagatataataaatcaaatattttatattatatcaaataatatgttaaaaaattaatgcagctttgttgtccataatagttctaatggggatcgttgttccattatcaaaaccaaatgtttacgcaaatgataatatttgcccagccgctattgaaaatgataattattcatctactagagaaacaatatattataatgataatgatttttcaagtagatataaagttttaaaaaatggtaaaaaatattatatgaaaatattagatatttgggaaattgttattaactcaaaaggatatttatgcaattcatttatgataagatttcaaaaaagacatagttatcaatgataaaaaacaattgacatttctttaaaataggactattatgagtaaaaataaacatccaagtacaaatgcaatgacagggaagagtaaataattatggagttttagagaaaagatggctggtgaaaatctttacaacataattattgaaggtagccttcgagcagtgaatcgaacaaggaaacttaagtagacttcaacgtatttcctacgttatcaggatagtgtatcgagtatttaactccgtacatgaagcaagagccaaagaaatttggaaattaggtggtaccacggataatctattcgccctagcataagtgcttagggtttttattttatctaaaggagaaatttaaaatgaaaacatttaattattcaactcgctctacccgacccgattttcaaggagattttttagacatgatgctacaagcgactaacaagcctaatttgatttctttcgccggtggattacctaatcccatctcttttcccactcaggaaatggcagcagccacacaaaaagtacttgatcagcatggtacaatcgctatgcagtatagtattccagaaggatatttacccttacgtcaatttattgcacatcaatatttgaaacaaggaattgatattagtgccaatgatattattatcactaacggttcccaacaagcactcgatattttatcggcagtactgatcgatgaaggtgataaaattcttattgaaaaacctagttacctagctgcactccaagtatttcatctctataatccaaaaatcaactcggttactttaaatcatcacggaattgacctacaggaattaacagcatatcttgaacaaaaaccaaaattcttttatgctatcccgacttttcaaaaccctaccggtttaacttatgacaatgaaacccgaattgctctagcaaatttgcttaaaaaaactaacactatctttattgaggacaacccttatggtgatcttcgttttaacgatgaaacatttttacctatttatcccttgctaaaagatcaaacgatactgctcggaactttctcaaaaacagtttctccaggtatgagaataggctggattgcttgttcaaactcttatttaaagcaaaagctcttagcctataaacaaatcgttgatcttcatactaatatttttgggcaaatggtccttcatcaatatctttgtgataacagtcttgaacaacaccttgaaaaaataaaaaaactttataaagaacaagcggaacaaatgataactagtattcaaaagtatttccctgctgaagttaaacatacaattccccaaggcggaatgttcttatgggtcacattaccccaaaaactaactgctgtcgctctagcaaatgaagcaatcaaacatgacatcgcaattgctgctggtgatcctttctatgaagaagaacgaaacgtttcaactctacgattaaattatactaattgtgatctaaaaacaattgatcaaggtattaaaatacttggtcaaattattaaaaatctcttagcctcttgagcgaggctttttgtctatattacaataaaacatcaaatagtaataagattctttgattactcatacactatattaaatttaaaataaaaaggacaaactaatgtcctaaatattgatcaaatatttttttcaaaccatctttgctggcaacaccttcatgtaacttagtattcccatcaaacaaagctggaacataataataatcatactgatctgctaattcactattgatttgctcatcaatcaattcaatttcaatttgattatattctgggttttcatcttgcaattctttaatccagcgccgtgcattacgacaatgaggacaattttctaaaataaataatttcatttccttatcctcttttaatagttttaattacgattggctgattagggcaatcttgtatatttctaggagcattagcaatttgatcaacaacctctaatccttccgtgattttcccaaaagccgcatagtcaccatcaagatgaggagcatcagcatgcatgataaaaaattgtgatgatgctgaatcaggaaccattgttctagccattgataatacaccacgagtatgtaataaatcattagctactccattacttctaaattcacctttaatactgtcagcctcatgatggttgaaatctttatcatatcctccaccttgaatcataaatcctgggataacacgatggaatattaaccctgcaaaaaaatcttgatcaattaattttaaaaagttttccacactaattggagcaatttcaggatataactcacctttcatcactccgccatcttccatttcaataataatatttactgtttccattctattctcctttatctactattcttgcttcaattatttcattagcaacttttttatcttttctttttttattaaagatcaatcctgcaatcagtaagattgctaaaattacaagaacccaaataattgaactaactaatttaaattgataagctgttgctacaatcaaacataaattaattatctcaaaagtccctgataatttccgtcttccattaaccaaaaaattaagggctaaagctgtacaaacaaacatccctattactaaagcgacttccataaataaccctccttcatcctttcttatcatatcatgattttgacttccagagcaactatcgtgtctccagactaataaccatgtactttgagcatattaactaattgaacataaaattcccgaacatcaaactcagcaatattctcacgatttaaatctatcatatcaccatgcgatattcctcttttcgtatttgttgttaaaaaagtataatcacaaccccaaggaaatgagttttcagccactaatccatcattaggcccatcaaaatacttcactaaatgatgcgaaaaattaagcggaaagcgacctcctgaagcaacatttagtttcgaaccaacactttgataaaatacttctgccacatcaggaacatccgcattgaacttttgacacgttgaagcagttaaatcattgaccgcagcaataaaatctggattctcgtccccaaatttcttaagggctgtattatatccctgagccactttttgtttaattttttcagggattttttccaataaataatctgcaaatatgcatcctcgatgtggagtattgatcgtagtaagtgatgccacatatggcgcaatattcagctttgcaatcgcataacgacaatctaaaccacctttagaatgtgcaataatatttaacttttcacacccgctttcctgtacaatttctttgattcgctttgctaactcatcgccactagcaataacactagctgctgactgatgattaccataataaatgaccgctccattttgttctagttcctcgggaattcgtccccaataattaaaatatttaaaatctctaaaaaacactccatgaaccaacagcaatggatattttgttttacacagctgttgttcttttctaactccatttaaaatagttttttcattttcaaatataatttcatcatcagcaattttaataagctttcttaaaataatcaaattaacaagtggaaaccatccccaaacaaccccgattatgcgccatttagctcctaattggttagccgttaaataaattctaataatgccattccaaaaaacaacagcctcaactattattaccactaatagattagttaaccatgcgccaatttctactttaaaaaatgaataaagcatataaacaattgtcattattaaagatattaaaaatatttttaataattcacaccctgctttacatatgcgatatcgtttcaaaagaggtctaggataagggacatatggtattgcattaataactataaaaatccccactaataaaccaattaacaatacgtttgaaaaacctaataacaacctatttgccaacacaaaaactattgttgctgataccagtcttattatatatttcataatttttccttatctcttatatttttacttattatactgccaaattatcattagtacaattatgaacaaaaaggtttatttaaaatgtcattcattgaaatcttaacttattgatttatataataaattttataaatcaataaaactatctattctcccgtcagatttcgtctatcaatcatgtatttatatacaaaaaagcgattaatcttaacgactaatcgcttgatatcgtcttaaattataaaatcagcacctattgctcaacaacgatcgtaatcatggcaaaatcctctgttccaatgttaataatgctatgtttagaatcttctttacaaatatggcagattcctgcaaataaactttcttcgtcatcatcacatatggctttacccatccctgatacaatataattaatattattgccagtttcatgcttatgcataccaaaagaaatagcaactaaaaataacttttctatttgaatctatatacattttagcatattatccccctgcagaatgctgatttatatttataaactaagaatttttaatcctttctttttctttaatacaacaaatatagtaattagaattccggctgcaacaagtaatgatatatgcaaaaaaagcagacactatcctactgtctggcaggatcgcagttttgaacatgactgtcaactcctttttacacatattttaaaagattttcttccctcaatcacatttattttaccttatcaaaaaaatttatgtctattatttatacgtacaagaaaatatttttcaaaaaagtctccctatcccctatttattccatcgctaattgtaaaatatccatctatatcaatcataattaaaaactctattacaattaatcttacttccaaatttatcatatcatgattattcataagcctacagcttgctattaaagtaaactatcatttttattttataattatattttctacttaatccaataggtgaagtcgtacaaacatggtaaataaaaaattatttttatttgatataatggtttaaaattgaaatcttttttatcattttatcaactgatataactaaaagagcctttcataaaagaaattgatattgtataatggttaactgaaaaatgataaaaaatatgcaaattatttgatacaaatttatattggggaggttttaaataatggaaaatttgaatataagagaagatgtatcagatattgttaataaaaccgaattattagcagatttgcaaatcggtttttggataatagaatatcctaacgacggaattccaaagatgtacggtgatacaattatgtactcgttattaggaggaaacagcaatactctgacaccggaagaactctattcattttgtatggagagaattgattctgaatatataggattagtttttgatgcaatcgaaaatataaaaaagaacaaaagaaccgaaatacggtatccatggagacatgaagaaaaagggtggacatgggttcggtgtggcggttttcttgataaatcatataaaaatggaataagatttaaaggctattatcatgatataacagatgaacttgagatggatatcaaaaataatgagcacaaaataatcgatttcaaaaaattacgattatattcaccttactttatcgaaaattgtgaaggcctttttgaaattgatatagatagtttagaaataaagactattttttataaaaagaaaaaatatcataaaattgatgatggggataatgttttttctgttataagaaaatggacacacccaaacgatattacacgtttagataatatttttgtatctgcatctctagaacaaataatcaataaaaaaaagttaaaacaaattgagtttaaaacaaaaacaatttttggagattatacttgggtagaagctagaatattttgtgcccaagtaatgggaattaaaaaattattattttatatttatgatatttctgatagaaaaactatttcctctttagtaaaagaaaaagaagaaatattagatgctttttttaatctatattctacaattgttgaagtggacttagctactgaaaaattacatatattaaaatctgttttacctaccaataatgatcatgatcaaaaaatattttcactaaaacaatttcttttgctacttgaaaaaagattaattatcaactttgaaaaaaaagaattagaaaactttttaacaattgataatttaagattactttctaaaacacaaaaaacatcacatcttgacctacgtttccaaaaggaactagaaaattatgaatgggtccaattaaaaactctctatcttcccaagaacaatgaaaaaatatatcttgtatttagtaatgtcgatagagaacatatcattaattcaattacagaaaaatttgtttataaaaaaggggattatttatattatcttgatacaaaaaatggctatttttctaatttttcgataactgataacggtactgtcattcctcctcaagaaggcaataattatactcaagcaatgataaaatacacacgacaaaataccgttttagaagatcaagacagagttatcgaacaattgactcctgaatatatacttaatcgtctgcaagaacaaagtgtttataaaattgaactaggtatgttagatgaaaataaagaatatcggagaaaattaattactgttcaatattatgatgaagaaaataaaatcgtacttattcgaagaagtgacattacaaaagaatatcttaaacaaaaaaatcaagaaaacaagctaaaagctattaaaaaagcagctgatacagatgcccttacaggtatctataacaggattggtgctcagcgtttaatagtagaatatcttcataaatcaaataatgaaatgagtgcttttattatcattgacttagataattttaagaaaatcaatgatagtttagggcatttacaaggtgatgaagtattaaagcaggtagctaatatattaaaagaaaattttcgaaaaacagatataattgctcgtttgggtggtgatgaatttattgtatttatgaaaaatattgttcaaaaagaaaatgccatcatatcattaaataacctgcttaaaaaattacgattatcttatcaatggcatgaagaaacaattctaataactggttctattggagttgctgtagcacctatagacggggcaacttttgaagttctatataaaaatgcggatcaagctctgtataattcaaaatattcaggtaaaaatggatttagtttttataatgaacactaatgaaagtttaagtcaatataaagatcaaataaaaagaaactaaaaaacctaatttaaatattaggttttttcatctatattcttttttattaataccttatttatgatatgtttcgtttttcataattttaaatgcccgatagatttgttctactaagactagcctcatcaattgatgcggtaaagtcatcttagaaaaacttagcctaaaattagcacgatcaagcatttcttcaccatgaccaagtgaaccaccaattacaaatgcaatcgtacttttaccagaaatcatggctttttccatcttatttgataattcaacagaatctatttgcgttcccgacacatctagcaaaataacataatcatcctgcttaattttatcaagcatcttacgcccttctttagctttaattaatgtttcattggccagtgagcagttatccggtatactttcatctgctacttcataaacttctactttgcaataggcctgcaatctctttaaatattcctgcattcctgccactaaatatttttcttttaaacgcccaacacaaactattttaatcttcataattacctccgctgaccacatcaatttggctagctactttaatattatcgaactctagattattttgattaaaaatcttacgataggtttctaatgccttctctttagtattagcttccccactcaaatgcgctaaaacaatttctttagttttatcaccgattaactctaccatcatctttgcactatattcattgtttaaatggcctagatcaccatgaatacgctgttttaaaaaataaggtcgtttcgttgccatcagcatctcaacatcatgattactttcaataatataatagtctagattattaagatatttccgatttttttgagatacataaccagtatctgtcatatacaaaatagattcattcacaccagtaatgataaaagccagcggacttgtcgcatcatgagatatacttaaaggcatgatttcaaaatgagctaattgaaaacttttatatggcttgatttcatggctgctatcgattcctttgatacatcctttaccacaaaaacagattctttgatcaaatatactaatatttttattatggtcataatgatcgtgtgttaataaaacataattaatattactttcttgaaaaccaagattgccaagtttatataataattgttttctagcaatcccacaatcaatcaatattcccacaccattatcataaataaaggtactgtttccttttgaaccacttgctaaaatatgaaattccattgtcttctccttttattgttttattatacaaacttgtatgcacaaaaacaataaatttgtcttggaaaaagcaggatgtgaaaatattgtcattaattttaaattttatgataaaataagaatataaagggggattttcaatatgcctagaattattactattgccagagaatacggttctggcggacgcttaattgcacaaaaagttgcgcagaaagtcggacttgtatactatgataatgaagtcatcgacttggcagctcgcgaaatgggaatggatgttgatgcaatccgtaaagtagctgaacaaaaatcatctagctttatgtatacaatgtcatcttccgctttttcattaccactaaatgatcaggtttttgtaatgcagtctaaaatcattcgtcatttagctaatcatgattcatgtatcattgttaatggatgtgctgattatatccttgaggattatgatgatgttttatctatttttattcatgcaccactagaatcacgaattcgccgagttaaagaggattatcaagaagtacatgatgattataaaaaatacgttactaaaagagacaaaggtcggagtaattattacaattactatacaacaaaaaaatggggtcatttaaaaaatttcgatttaacgattaacagtgatttaggaatcgacgaagtcgcaacgatcattgctgatttgtttttaaaaggagaaaaatagtgacccaagaaaataagatgggaacaatgccggtcaacaaactgctaatttcaatgtctctaccaatgattatctcaatgttagttcaagcaatgtataatatcgttgatagtgtctttgttgcccaaataagcgaaaacgctttaactgctgtttctttagcatttccattgcaaaacttgatgattgcctttgccgggggaactgcagttggcgtcaatgctttattgtcacgtagtttaggtgagaagaatcaagatcatgttaaccagacagcagtcaattcagtatttatttttcttgtcacggcggttatatttatgatcgccggactaacattgtctaacctcttttttaatgttcaaacaactaatactgaaattgttaatgccggtacccaatattcaatgatcgtagttggctgttcaattggattgttttgtcaatttctatttgaacgattattacaggcaactggaagaaccctgtttactatggttactcagggattaggtgccataatcaatataattttagaccctatttttatttttggtttatgtggctttcctaaaatgggtgtcgctggtgctgcacttgcgacaataaccggtcaaatcattgcttgtcttttagctctatttttcaatcttaaatttaatcatgatattcattttaaatttaaaaggtttcgacctaatgctcatattgttaagcaaatatattcagtaggaattccatctatcatcatgcagtctatcggtagtgtcatgacttttggtatgaatactatcttaattactttttctaccacggctactgcggtttttggtgtatacttcaaattacaaagctttgtctttatgcctgttttcggtcttaataacggtatgattccaatcattgcctataatcttggggctaaacaaaagaaacgaatgtttgatacaataaaattggcaatgatctacgctactggcatgatgatcattggtgttatcttctttgaaacaattccgcaaactcttttaggtttctttaacgcctctgaggcaatgataaaaattggaacaccggctttaagaataattgctattcatttcatttttgcaggtttctcaattgtttgtagtgcaactttccaagctgttggtaaaggtacatatagtcttttaacttcgttgatcagacaattattagtattattaccttgtgcttatgtattatcattaacaggtaacttagacttaatttggctatgtttcccgattgcggaaattttctctgcagtgacttcttttattttaatgaagcgaacccgtagacatttagaattttaagacttatgaatcttcataagtcttttttgcagcaaaaaaggagcttgcgctcctttacttgtgtaattatttaagtccgtattttttattgaatttatcaacacgtccatcagcactagcaaatctttgtttaccagtatagaatggatgacagtttgaacaagtatcaacacgtacttcgtctaaaactgatccaccttcaaattcgtttccacaagaagtacaaacgatttttacttttttgtaatctggatgaattccttttttcataaatatcaatctccttccgccttatagcatatagctacaaagtaagttgctttagtataataacattaaaatatctagatttcaagtcatttttttaaattaatcactaatcttcgacttgacgtctagtaatcacagctccaagtgaaattaacttatgatcaatattttcatagccgcgatcaatatgataaacatttccaatttcagtaacaccatcagccattaaagctgccacgatcaacgctgcaccacaacgtagatctgtcgcataaacacgtgctccatgtaatggcgtaggaccattaatataacacattgcttcttcttgatcaatttttgctcccattgaattcagctgataacaatgtccaaagcgttcaggataaatcgtttcaactacttgtgaagctccctgacattgagttaataacgctgttagcggttgttgtaaatcggttgcaaaaccaggatatacctgtgtcctaatatcaattggttttaaattatcaaggccgccatgaacaataatactgtcaccaacaatatccattttaaccccgatttcttttagtttagaagttactgcttctaaatgttgaggtataacattttgaataattactttttctcctgccgctgcagccatcactaaaaatgtcccagcttcaattcggtcaggaataatttcatgatcacaaccacaaagagtttctacaccttcaattgtgatcgtatctgttccagccccacgaatcttagctcccattttcgtaagtaaattaacaacatcaataatttcaggttcctttgcagaattttctattgttgtttttccttctgctttaaccgctgccaacaggatattgattgttgctcctactgaagcaaaatccaaataaattttattcccaactaaacgatcagcttcaatcgtataggttccattatcactataactaacttttgcacctaatgcttcaaatcctttaatatgtaaatcgattggtcgtggtcctaaaaaacacccaccaggcatcttcatcgtcacttttttgcattttcctaataaagctcccattaaataataagatgctcttaatttatcaactgcatcacttactaaaggtatattttttaagttagaaggatcaaccactaacacatcatcatttttatctacttcacagtttaattctcttaacaatactcctaatgcatcgacatcagaaatatttggtaccccatatactgttacaggactatctgctaagacaatcgcaggaattagagctaccgttgcattttttgcaccgcttaccaccacagttccattcaatttgtgtccaccttcaatggcaattacttcactcattttagtcctccttaaaatttaatctacgtaactactatatattaatttattgttaaaaacaaccaaaaaatgtatttttaaaagtttcgaattttttgacaatatctaatatatttctattttcaaaacataaaaaaatctaccaaaccaatattaactcaatattaacgaaaaaaagaaacctttatgtaaatggtttctctaatttttctatatttcattaaaataattaccactaaaacctatttagcctatttccattccatctaagaattagacagataattgaagtaaaaagcaataaatacaaatatgtctgataaagatagttaatttcttaatacaattattaaagatacttttacaaataacaatctttataattaagaaagagttctaaatatttgaatatatcattacaagacaaaagcgtattttaccatcataaggtaaaaagcaaattaaaatattattgacaactgtaaagtatacgaaatcgtgcacacagcaaagtaatatagctcattgtttcctaataagaaaatcttgtaaagcactatttcaaatcaacatttagaaataaacataattctcgaacgaataactttacattcatttgaccctgtatgtattactacaacaattgacctataatatctagaggacttgtttaaaaaatatgaaaaagcatatctaaaaacagtaaaataaaatttacctatttttaatatatcccataaatatttataaaagtaatcctaaaattttagaaattgccatcccattccacttatgaaaaatagactttagcccaaataattcacagagtctttaacttcgtttaggtcaatacttttaaacaattatgttacatttctttttctttatctggttatatatcacctgcgtttttttgttcgattactttaatcatattaaataagacttcatttacaggtgtgggtataccatattcttttcctaattcaataacaaccctactaaacatatcgacttcagtctgacgatgtgagcgcaaatcctgtaccattgaacaaatattgtcataagggacagctgctaatttatttctttgttcatctacccattcttgcttaatatttatacctttcgttctagcaatttctagaacttcctgtgccgccatctcccttagtttattagcttcgtcactagtattccatactccaaatggaatgtttaagatcgcacttacttgattttctgcaacattacacataaatttaaaccattgttgagcttccatatctactggaactacgtgatttatctttgctttattaaatatatttgatatcgattgaacatctaggcttattggatcgtttttcttatttccaaaaaaatatgtcccatagtctgaaaacttgatatgattgtttgtatttactgacgatatttttgtaaaaccatataatacttgttctgaagaaaacgtcttttttagaattgattctgaaataacaccattttgaaagcatataatttttgtgtttggtccaacatgatttttgatatctttaatagaggcatctaactgtgtgtacttcgtacaaataataattaagtctaaaatagtattttcttctggttcaataacattaaatacatatttttgctcattaatcatgacaccatcattttgcaatctttttttccttcgaccacccgcaataacatagaaatggtctttatcataatcagaaaactttttagcaattggagctccaattgctcctacaccaattaatccaatttttttgacattcattataccacctctttatctaaattataagtaagttttcctaacttagatataccaacgataatttgttcttttgatgcactagtaaaagacaaacgaactccattacaataagtatcattatttaccacaaaacccgttcctggaacaactgctatattctcggacacagcagcctcgataaactcatctaaatgaattccttttggcaagttaaaccaaataaacattccaccttcaggtgcgataaattgcactttagggttaaaattctttttcatttcttcaatcattaaaatacttttttctttgtaaatatctttgaccatttcaacatgctttgccatatctgttgtcccaataaaacgtgctataatattttgatttagccatgatgtagtaccatcagcacaggatttaaggactttaaacttatcaataatctcttttctagcagtcaatgtacctacacgcatacctggtgagataatttttgataatgaagcacaatatagtactattccttctgtatccattgatttaatagttggaatgtgttttcctttaaatcttaaatatccataaggattgtcttctagaatcataacgtggtactttaaacataattcatagatagctttcctcttttctaaagaagttgtaatacatgttggattttggaatgtaggaatgatataaaacatttttggagttggttttttttgaaaagctttttccaacaattcaagatttactccatctgcttctaatggaattccaattagttttacattatttgctaaaaaaccattagttgcccccataaatgttggatcttcacaaacaatgatatctccatcatcacaaaatacccgagatgccaaactcaatccctctccagaccctgatgtaataatcatatcatccaattctgtaaataccttttcagtttcattaaagaaatttgctacagtttgaactaattctggataagctggagacatcgcgtattgtaaaatctctaatggtttttgttttaaaatgtcatttgtgattttttgaatcgcatcaaccggaaatgtgcgatcatctggaaatcctggagaaaagttaattgccgtatccccatggattctagtaataacttctctaattgtttgtggttttatttcatcaaatctttttgcaaagctatagttcataataaatttcccccttaaatataacttgttatgattataacaaaacaaaaaaaacaattcaataatattttattactttgataattttatttcaaatataattactagaaataacttgtttaaaagatattcaccaaaatcaataaataactattaatgggataatttgtaatattatcagattaactaaaaacgataataaaagtgattgaactacagaatattaataaattttttggcaatacccatgtactaaaagaaatcagtcttcgtgttaaagaaggagaaaaattagttatcttaggtccatcaggctcaggaaagtcgacaacaattagatgtattaattttttagaagagccaacttctggtaaagtgttcattaatggtgaagagatgacaaagaaaaacaaaactcgtttagtaaaggataatgttgcaatggtctttcaacagtttaatttatatcctcataaaactgttttggaaaatcttactttagcacctccctctaagccaacacactatctaataaaaagatacatcttcactacatcttgttttgaattcatcaaatttagtattaagcatttcctgaaaagtttcttctaataaatcttttaaaatattagtaatatcatatgttaaagtaataccatattcattaatatatatctaatatttgtcattattactatattcttgacttaatcacattgccatagcaggttttttcgctaaataaaacgggtctctaaatttccgtggggattctaaaaacgagactctaaaataatgtggggctttattggccccaaacgtgtttaaagtgaaaaaagtattattcaaaaccatggggttaagaatgatacttttattctacagaaacaaccatttctaatgattattttttatttttcttataatttcctctttcttttccaggctctctatttgtctttcttgacatagtaccattctttctatttgtcaatagaggtaaggaatctttattaatacagtacattatacggcttcttaatctttcaaagttcttatattttaatgatgttttcaaaagaacttttattcttccgttaattgattctattggacctgatgctagtataattgtagcgttggaaatcctttgtctagtagcaataaaaggattttcttcaagaaaagacttatgacaatcaatgcatataaatcttctgcatctgtaattgatataggttttatttacgttgaaaatagaatgagtgattttttaatcttgtaatccttgatatttgcatttaaactgcctcaacagggacaaggcttaatttttctggttaaagtgacattaataaaaacattattatcagttcttacaatgtttaaatcttgaatatcatcaggttgtaaacccagtaaatttatagtatcataatccatgagttaaaactctcctttcatatatggttgtttctacaaaaacatcatatcatgaaaggatttttttaatataaaggatacccctttaaaatttagagataaaaaaagggacacccctcagaattgtggcactttaattttttctggggtaaaagctatcctttaatttttataggggtttacacccattcctttaattcattggggtcatcatattttagatgacctttttttgataataaaatttcttccgtggcatgatttgagtgcttaattcaatctatcacaaaaagagtaatatcatgtcagatgatatcgttaatattttaaatcttaattactctgatgtacagtcttgtacataaaaaaacaaaaataatcacattacttattttgttaccttgaaccaaaaagatttcgtatgtccttaatgcttcaataggattagtataaaagactacagagaagtaaaaataagccaccaaatcattcgtgagatggatactactattgtttacagaaaaagaagatattattgtaaacaatgtaaaacatatcactatgaatataacccattcatagctcaaacaaaatcacgttttactgatttatctacaattagaataatggattcacttagagaacattcagctactttttctatggtagctagacaatttaatactacaccaactaaagttataaatatatttgataaattaggacaaatgaaaaagttaccttttactgaaatcgtttctctagatgaattctattggaacagaaaaagtaaaaacaaatacgcatgtgcgatattagattttaaaacaggtaatattattgatattcttaatggaagaactttaaaaagttgagatagatatactcaactacttgataaagaagaactcaataaagttaagtatattagtattgatttatatgaaacatatagacaagttcaaaaaatctattttcctaaagctattctatgttgcgattcatttcatgtaattaagaatattaatcttattctcaaaaacgaaagaattaaaataatgaaaagatataacactgatagtgttgaatactatctgttaaagaagtttaattttctgcttatgaaggattcatcaaaaattgaatatatcaaagctaaatacaacaaaaaactaaaaagatatattaattatcctcaattgttagaattaattctttaaattgatccattacttaaagaagcatatgaattaaaagagttatacttagtatttaattctacatctactttaacagatgcgagtgaaaatcttgcagaggtaattagagaatactcttgttccaatttggaaagttatagaaaatatacttcaactttacttaattggttcgaagaaattataaactcatttaatatgtatgaaagttcaagaatttcaaacggaaagattgaaggaacaaattcacgtattaaaacaattttaaaaaatgcaaacggatttaaaaacttctctagaatgcgtaatcgtattatgtttttattaaacaaaaattctttaccatcaacttcaaaaacactacaagttataaaaactgcaggtaaaaaaagaggaaaatataaaaaataaattctaaattaataaaagattgattaagcaaaaaaggtagcaatagtatgtactattactacctctatttttgataccaaaactcccaagaattaaagcaaatccacgcttaaccccagtttaaattaaagtatcggaattgtagaccgagggattgaccccacgctaaattaaatttctaataaaaaccctcctttggtccggctcacttctataaaaaagttatttatttacaacacttgttggatgtccttcaatataatttataaaattttcacaggcaagatcaactgtacgataacgagcttcatctgctaaccatgcaacatgtcctgtaacaataacattaggatgtttaataagtagtgtaggctgttttggattttcatcaactaaaacatctaaacctgcactatatatttttcctgaatttaaagcatctaataatgcgtcttcatcaatcaacttacctcttgctgtattaattaaaattacgccttctttcattttattaatattttctttattaatgatttcttgagtttcttttgtaaggggacagtgtaatgagattatatcagaattcgataagacttcatctaaagacagctgctcgataaagttgtatttatctccctcctttcttattaaatcataaccaattattttgcagccaaaaccatttactatttttgcaaaattatacccaattgatcccaaaccaataattccaacagttttatcagtaatttcgatatgtcgatagagcgctttcataaaaggattattttcattttgaaaatatgtactttttatatattgactttgtagttccacatgatgacatatttccatcaacaaagccattgcatattgtgcaatagtggtatttccatatattgtatttgtaatagtaactccataccttttcgtcatttctttatcaaattcttcaaatccatgtgatgttgttgcaatatattttaaccgtggatgagaaataaataaatcttcaactaacacatcactagtaatccacataccaattaaggcatcataatcatctaaaatcttatcataatcgttaaaagtcataaatgcatccttgatcagcaccgtatattcaatgttaggatatttatgtaatacctcataacgttttaccaaatctgatgtttttatagtgggtgacatactttcactttgtaatattaaaaccttcattcatattctcctccatatctattttttattgattttattggcaaaaatcatcttataacttcttacaagtgtttatggaagtgagaaaaaaccttgtattttcaatggttttcatgttcttgcttgtatcttttcatatcgttgtataagttgagtttgtagagttgggcaccatttcaacaccacaaataatgcaatacacagaagcatagggcaatgttatcgcgcccacaaaggcaatttaggacaaccttgttttattcctttatgttacgtcaatcagccttacaaacaaatgctttataggcacagaattgacaggggaagatgtttataccttttctatcaaaaataccatttaactgcataacatttcaaagcaagctgctatctgtttagattatcctttcctttctgttcaatggtgaaaagttccatagcaagcataggaaaggggtaccctttccgtaaaatcgaccgttttcgtctataacagaaagagagatttttacctgttgggaatatcccaaacccacaccaaaccaagagtaatcaaacttacagtctatcaaattctcctgacacacaaatcaaatattgatataaagtaaatgatttataaccacttccatcaagttcttcatcatctttgatacagtaactgttctcaaccatgcatggaacaatctttccgtatacgtttgataccataacgcctgatattttttcatctttgacaatgattgactttacgttcttgtcatcatcaagacagcaactataatcatatttgtttttcctgcgttcatgcaaaggcctacgggtatacagcccattacccaacctgaaaaagtgcacctgttccccgattggcaaaccttcaataagcacttcaaaatcttctggatactcaacctttccaaagctatcctgatatgcgatctgttctagcatgacgacacctccataaatactaattgtaattctgttatctcatttttgcgattttttcataagccaatttaaactcttctataatcaattccggcacattggttcccctaagaactattaccgtgtaatcctttaagctgtatataccttcaggaaagtgattgatgtcttccatcactgatgggattaaaacctttttcacttcatcatccaagcaaaatgctttaccgatgacaccataacaagccaaataatcaagacaccagtcatctcgtatgcctctattagcaagtcaagacataacattccgcacctcagaagtatcacgatgcttttctgcaatattcaaaagccgtttccactgcggcttatctatatcgtagttttcataatcataccatttaccaatagttggttgaaatccgtccatactgcccatccctccacagcttctaatttatttgcttaaattatagcactcatatacgaatttctctatcattcccttatatttgtccatattgttttatttcactatggaaaattcgggcaccatttgggcaccacagagtcaaatccacttactattttgaatgttttaatcaatgaaaatgtctgtatttgcaagaattttcacaatctaatactctccgatacccaaatttcaaatactatttttttatatctatactaaatattatgttattataactataacatagtttatattttattatgataattatttattacacttacagaactgcaattttaaatattttatatccaactatattaagtaatctttaaaaaattaattttcatcaaagcatattaatatataatatttcttttttgtatttaccttctttttatattttaccgacatatacattatattgtcttctaagtaattccattgttactttatttccgtaagctctataataattcgtatttttttctcaatattagctatcataaaattgtgctgcaacaaaaagcatagaaaaaatcactttttaaagaaacaattgagtaaatatccaactgttcctgttttttactttcctgtacaatattaacttttagtctaaataattgaatttacttcactttatattatttttttatataaaagctacaaatttactttaatacttcataatctcatttaaagtgatattagtattatccattaaatacatatttatccaatctatctagtgcttcttttaatctagacaaaggtagcgataaattcatgcgcattccataattatctttatattctttaccattagtccacattacaccaacttctaatccttttagatatagttcatcattacttagatgatgcttttgacaccagtcatggcattgaagaaaaattaaatatgttccttgagtttgactaacaaaaacaccttcaaaatgttcattaatataattaatagcgtatttagagttttcttccaatatgtcttttaattgccctaaccactcattacctttagtatacgctccgatcaatgcatgcattgatagtacattcatggaattataatgtgttaagctttcctctttatctagacgatcttttaaccatttattataaacgatatgataactacctatcattccagcaagattgaaagttttacttggggcataaaaggatattgtatgattttttgcataatcgttaacattctgtgttggtgtatgatgatagcctttaaaaataagatcactccaaatttcatcagatattacatatacttgatgtctttcaaatatctctattgccttaagcaattcctctttttcccatactctaccagtaggattgtggggtgaacaaagtaaggcaacatgaagattgttttctacaatttttctttccatatcttcataatccattctccatactccatcattatctttaattaatggacttaaaaccatttcataaccattaggactaataacattagaaaaaccattataagtgggagagtgaattaaaaacttatcacctttagaacataagatatttaaagcattaacaaccccgccaataactccattttcataaccaatattttctggtaataaatcattaacttgatgttgttgtttttgccaatcaataatagcctgataatattctttactataggcaaagtatccataaactggaaactctaaacgttttttaacattttcgataataaagtctggtaccgcaaaactcatatctgcaatccacattgggatgacatcaaatccttcttgtaacttataatcaggaaagatattcattgttccatgtactggagcatcataggctaaagaatcatgtccttcacggtctaagacagttgtaaaatcatacttcataataataaacctttctattttcatattataaaagaggataaaaatcatcccctttatcttcttttactgagttactaaacttgttttaacgcgtttctttctactaggactagaaagatagcgaactaaacaagataatgtaaagttaatcacaaagtaaacaacgacaataattatataacaagctactttctcatttaccaatacatagttagccattactgcacgagcttgatacatgaaatcagctattgcgatagttgataagtatgatgtatctttaatgattgtaattagagatgataatagttgaggaacgatcattttaatagcttgtggtaaaataatatatcttagtgtttggtaaaagttgaaaccttgtgaactagcagcttcttgttgtcctttagaaatcgaattaattccggaacgaatttgttcacaaagaattgatgagaagaagcaaacaaacataatgattactgcagtatatggttgtaaaccaaacgctctagttaatgcaaatctcgcaaacaataaccataatagtaatggtgtatttctaaatatttctacataagctattacaatagctcttaataatttattaccatagtttcttgccaaggcaagcaataaacctaacaaaaaactaaagaagatattaatcaaagcaaattgtaaggtaagaagtaagcccctaataaagtaatcaatattattcattgttaaaatatttttaaaagcatcaaacatattatacttcctcctcaatttgaatttgtttgattttacttgttatttttttcttaactttatttgtagaataaccactactatattttttttcaaaatagcgagataacatagtaagaggataacaagcaatgaaatatataattgcactaataatatatgaaggtccggcatgtcctgaataagaagtccatacttcagcttgatacattaaatcagctactgcaattgtttgtagtattgaagtgtttttaataatccctactatttgcgttgttagcggtggcaccaccactctaatagcttgtggtaaaataatatatctcattgtttgccagtaattaaatccttgtgatgcagctgcctcttcttgtcctttagaaattgatgcaattcctgaacgaatgatttcacacatatacgctcctgtatatactcctagaactagagttccaatttggaatgtatcgacagctttaccaaaaacatatggagaaaaagcaaataagaaaaataagataatgataattggtgtattttggaagaactcgacatagaccctagaaatgcccctgatcaaaagtcttttagaggttcccattaagccagtgattgtcccaataactaatgagatgatcatggcaattattgcacaaaggagacttactttcacaaacgactctagaaatagaggtatttgtgaaagacagtcttcaaatcctgtaaaaagtacagccatgattatcctttatagtgatgatatggaccgaattcttcatccaaatcacttggggcatcttgtgaagcgtaaccttgtttttctaaccatttagtgatagaaccatcttcccagaatttcctaacttctgcttgtaagaatttagtccattctgcatcttcgccaccagttttatacctagtgatcaaacctaatggctgtggttcaaaactttgaccaacagtatctgcaaagatttcaaatgaagtccccttatatgcaaataattgtgtataatcaatacaataagcatcagtagcacctgaatctaatgccacaatgatatcatcattagtagtatattctttaaattccacataatcagcccaatcagacattcctttttcttcttccatgtatttaatcaaagcatctttagaagtagtacccattacaactgcaacttcaactttctttcctccagttttaaatgaatctacacctttagggaaggcaccttttttagccattactgatattggatcattgaaataagcacttgtgaagttccaagatttagctctttcttcagtgattgtcactgaagctgctgataaatctaattctcctgtatctaacattgaagtacgtgttttagcatttactttagtaaatgtaactttgataggatcacaaccttttttcttagcaatatctttagcgatttggttaaccaaatcaacttctaatccttctaaatcccctgttttagtattttctaaggcaaaacctaatttgttttctgatataccaactttcatttctccagattctgcaattgaatctaaaaccgaatcactagtagatgaactactattcccgcatcctgttaatgtaagaacaactgcccctactgcaattaattttgttaacttatttatttcaatcatttttattccccctcttatatatctagtttctaataatctttgataaaaaatctttagcacgatctgttttaggatgttcaaagaattcttttggtgtattttcttcaatgatttctccatcatccataaaaatcacacgatcagcaactgcttcagcgaatcccatttcatgggtgacacatatcatggtaatattttccttagctagattagtcataacatctaatacctcttgaaccatttctggatctaaagcactggttggttcatcaaataaaataatctttgattgcgaacataaagccctagctatcgctactcgctgctgttgtccccctgataacatctctggatacgcatgagctttattttccaatccaacttttcgcaacatatgcaaagcattttcttcagcattccatttctttactttctgtaatttcattggtgctaaagtaagattttccaaaacagttttatgaggatataaattgaactgttgaaagaccattgcaacattatcctttactaaacgagttttatttttctttgtcatctcttcaccattaatgaacactttaccagaagttggctcttctaaaaaattaatacatctaattgttgtcgactttcctgagcctgatggacctaagataactaatttttctccttctttaacacgaagactgatttcttttagtacatgggtattgccaaaaaatttattaatattctgtagttcaatcacttttatcaccctttctttttatttatggttcttattatacagttctactttttaatgtcaataattttttatcacattaataatattttatccataaatagaattaatctagaattgtttctttacattctaatatatttactatttttaacaattttaaagtaaactaaatatccaccagctaagctcaatatcattaagttaaggtgatattaagataaagatgggtaataataaaccagctccttcttttttgaatctttttgattaaaaggattgacaaatttttacacatgcgaggcttattatcaataacaaagaattgataataagtcttttgtttataggtaaggaattttggaggtactacttatgaacaatgcacgacacttaaagaaagcttccttttaatgaactaattaagtttattatctgtatggaatcgggcaccattaaagataagctttataagtattttggtttatcaaacaatgtcacaactgcatctgcatttatacaacagagaaaaaagattaaacatgaagcttttcaatatatctttgaaattttttacataaaaattatcaattctaaattgtataaagaatatagattaaatggctattgacggatctacattaacgttatcatttgactgctctttccctttaaaaaccccataaaccctgaaacactatatttgggcggtatttctactaacatatgtacatgatctatgcatacttccgcttctattatatttacgcctttccattcacataattgtcttagtattgctcctacctctacccttcttgcttcataaaatgctcttcttctatattttggtgcaaatacaatatgatatttgcaactccattttgtgtgtgataaactatgtaaatcatctgaatactgtttattcatttgtcatttcctcagtgatatcttatttttgcagttggtagccgcatttatattatatcacgtgaggtttttcattatcactccgctaaagctttttgagacccccagcctagctgggggtttattgcagacaaaaaaggatttcacatatgtgaaatccccattaactatagttataattaagctttaccaatgcaaccaaagatttccattttttctttaacacattcttggatagctgcagcacctggtgccaataatttacgagggtcaaatcctttaccttctaaatcttttccagcttcaatgtattttcttgttgcttcttggaaatataattgacattcagtatttacattgattttagaaacacctaaagtaattgcttttttaatcatatcctctggaattccagttccaccatgtaatactaatggtaatttaccagtttctttttgaattgcatctaatgcatcaaaatctaaaccttcccaattttctggatatttaccatgaatgtttccaatacctgctgctaagaagtcaactcctaagtcagcgatcattttacattcttttggatcagctacttcacctttaccaacgacaccgtcttcttctccaccaattgatccaacttctgcttctacagatacaccttttgagtgacataattcaacgatttcttttgttttttcaatattttcttcaattccataatgagaaccatcgaacatgattgaagagaaaccagcttctaaagcagctttagctccttcatagctaccatgatctaaatgtaaagctactggtacagtaattcctaaagaatctaccattgctgataccattgctgatacagttttgaatccagtcatatatttagcagcaccttcagatactcctaagattactggagcttttaattcttctgcagttaaaagaatagattttgtccattctaagttgttgatgttaaattgaccaactgcataatgtccttcttttgctttatttaacatttctgttgctgatactaatcccataaaatttctccttttctttttactcctatatattactattatttaattgaaatttccatagtaacacaaagtttttttgcctatttcctatatttttaccccattatctgagtcgtaagcgatttcttttttagaaaataaagaaaatgcagcatcaatgatgctacatcactaaaaaatagatatacacgatgaatagcagtgggaaacttgttgctactggcgggacataacatcaactacattttctccttatctataaaagattgaattattaaactatttggagaacaattaaaaaatcaatctctaaagataacatattaaatctgcgctcattatatcaaacaaggtttgatacggttttattatattacattttattattatgtcaataataatttattataaacaaaaaaataaaagaccaccaccggtgatctttatattagctgtctattctttaacgcttgatataaattatctagagcctgcactaataaacagcgcggcatcgctaaattaaatctctcaaaacctgctccaccaacaccaaaaatatatccttcatcaagccataatttagcttcattgaccataaatgcttctaattcctcgtgcgtcatttgcaaagcactaaaatcaacccaaacaagatataacccctgaggtttaatcattttgagcattggtagttttttctttaaaaaaccatcaagatatttaatattgccatcaagataagccactaattcatcaacccacttatcaccatgattataagctgctttacacgcttcaataccaaaaattgttggttccaccggaaatcctagtgaacttttaaccttaataaacttttcttttaatttatgattaaaaaataatatattagacgtctgtaaacctgccagattgaaagtcttacttggtgctgtacaaataattgtaaattctttaaatgaggcatcaacattaacaaaaggaaggtgcttattccccttataaataaaatcttgatgaatttcatcactgactaccagtacattatgtttcttacaaatattacctaatttaaataattcttctttattccaaacttttcctattggattatacggattacataaaataaacattttcacatcattatcaataatcaactgctcaaacaaatcaaaatctagttcgtatgtttgaccagtaaacatcatcggacattcaattttcttacgttgattttcatcaatagaaaaatcaaatggataatacactggtttattaatgataatagcatcaccgggagctgtaaaagcattaacagcgattttaagcgctgttactaccctcgttgttgttacaatattatctgcatttatatctaattgatggcgacgcttcatccaattacaaaccgcctcataataatcatcgccagccattgaatacccatacactgcatgtttagcgcgttcaataattgcctcagtaacttctggcaaggtttcaaaatccatatcagcaacccataaaggtaaaatatctttcggttttccttcttttttccaagtatcccatttaatacattttgtatttctacgtttgactattttatcaaaatcatacattcttacaatctccttataatccacttattatcgcaatacctgtttatctttgaattccatcattgaaaagtggcataacgtgattcctaatgccatggataaatttagtgagtcaattttatcactatgagggataaatacactttgcccatattttaaataatcatctggcagtccgctactctcattaccaaaaaccaatgaatgtttattatttgcagcagtaatctgatgaatatttttagctccttttaacatcaatggatagacttcacgttcagggtatttagttagatattcatcaaaactattaaaatattcaaaattaatattaaacaaagcccccatcgatgccctaattactcgtggatcaaaaacatcgactccaggacgaataatcgctaaattagtataattaaaacctaacatagttctaataatcgtccccatatttcccatatctccgggattaactaaaacaacatgattagcatcttctaaatccatcgtatatttcttaatgattgcaatagcaaaacaattatcttttttcgctaatttattaattgtattatcactttcaattaattcaattttattttgttgacataaattctcaataatcttaacacccttattttgataagagttacttttgagataaacacgcatcaccaattctggtttattctctaataattcaatcgtttcaaaaaccccaagagtatatgtataatcaaaatctttatgatatgtttttattttcattttataaacctttcaataaatcaatttgctttttcaaatcctgctgcattgataaaaaatgtgctttatcaaaatcaacaccttgatcaattaaatctaaaagatcattatatttatcatatgctaattctaataacgagatttgaatttctaaatctaactcattattagcatcatttacaatttgattaatatctttatatttatctttaaatacctgttgcaaatcaactgtctttttcttcttaccaaacaatcccatttcaactacctccattgttatttttataattatagcgtgtttacttagttttgaaaagtttgttatttttaaattgagagatgtttatataacttcccgaaaggaatcactggtgctggtttgcctggatgctctcctaacattttttccatccagatcatgtcatgccattgattaaacttatagccgcatttagtaaaataagccaccttttgataaccaaaatgttcatgaaacacaatactttctggattcccagcagtaatacaagcatttaaattaataatattttgctgtttcgtaatttcttctaatttatggtataacatactgccaattcctccacctttataatcaaggtcaatataaatcgatgtttctacagcccactgatatgcagcccgacttttaaatgcggatgtataagcatagcctactatcttatcatcaagcttagcaacaagatacggatacttttctaaagttgaaacaattcttgccctaaattcttctaaagttggtacttcatattcaaatgtgattgctgttgttagtacataaggtcgatatatttccaataaccttgcagcatcatcagctgttgcaacagcaagcctaattttcgtcattgataattcctccatttttctaagataaactgtataatcatgatataataatactaactttatcaaaggagaatagcaatggataaaataaaagatttatatcaagatgacctaatctacattttcactcgttcacaattacgtgacttaaacactgattacttggcaatcattaaaaatgaatgttctattcagacaatcaataactgcataacaatgcactatcaagatgatttcgaatcattattagctttttctctaccgactaaaaacagaaaaaacaagcagttaatttctttaaatcaatgctataaaatcatggataaaattcattacggtgttttatcattcacccatgaaggactaccttatagtgtagctttaaatcacatcattgttgataaccgtattttttttcactgtgctaaaagcggctataaactaaacagcattgaacagcgtgccacttatcttatagttgaagatctaggtattaatttaaaagcaggaactcataaccataattccgtcgctgtctttggaacagttcatgaagtaactgagtttgagacaaaaaaagctgcactattaaaaatagtcagccatttagcgccagaacacccatacaatgataagatggtcgatacaactaatatcatcgaattagaaattgattatattaacggaaaaacacatattcgttaattatcaaattcacaataaacaaaggtaatactaaaatacttcaaatcaaacagttcctagctgtaatgccctttaagttgttttaacaacagagcttattatatctaggagctttttaaattcacaactactatttcactgtgttttgcagttctcattgcatatccccagccacccattcctgaggtcacgatcccatgaaaattattatttacttcaattccatagttcaaatcattaaccctaataaaactaaacaaaaaatttaaaggaaatatttgtccagcatgagtatgacctgataattgtaaatcaattcccaattgttcatttaattcataatcatgtggctgatgatccaataaaataagcggtttagaagtatctaaaggttccgtcaaatcttttaaagcttctcgcttttttacaacatagtctttacgcccaattaaataaatatcatccaatttagtaacatcgtccaacaataccttaatccctatttcttttaatttcttaacaatattaaattccctaagtggtgagccaccttggaaaccaatttcatgatttccttcaatataataaacagggtatttactagccaatattttaaatacctgtaatgaataatcaaattcatcttgggtggtcccttcatcatagatatcaccaagtagaataatcccacttggagcaatagcttcagcatgttcactaagctttgttaaatccgccttagtgacaactgttcctaaatggatatcagaaactaccattaggcttttatctacaaaagatttattgattattacatcatacgtagtaataacagtatttttagcattataaattccataaaaacttaaaataacactggcagccaaagcaaccattccccgttgataaataaatttaaaataacgattaaatctagttttatataaaattaaattaataatatcaaagattacaaaacaaatacatgcattagccaaaaaaccaaagaaaatcaaattatataaacacaagccgattaaaattccaataataactgttgtaataatctttcgatattttgctttagcaaaaaccaaatgtgtatgataagcaagatatactgtcataactgctaccaaagtcatctccattaaaacaaaccagctcataataaaatcatctccttagtaaattatatcacaaaataatcttaaattatctcactattgtcaataaaaaaactaaactaagatcatttgaaatcacttcttttttcgcacacttaagcttcaaaaatagtaatacattacaaaatctgtttagttttttatgttcttatttactaatcaaatcaattactacaatctcgcaatttttactagttctcatggcaaacccccaagtccccattcccgaagaaacgatcgcattaaaattatcatcatgacgataaccataattcatctcattaattcctaaaagattccaaagcggtaacatcggaaatacttgtccagcatgagtatgaccagagatcatcaaatcaattcctagctttttattttcctctaatgagcgaggctgatgatctaataagatcactggtttattctgattcatcccgttaataatctgttctacaggttttcgctttttaatcttataatcttgacgtcctacaatatttatatcctcaaattcaacatattcatcatttaaagtattgactcctgccaattgcaatcgttctaatatgttatgttcttttaatggggaactactataaccaacttcatgatttccaattacataatagactggataggatttagctaactgggtgaatattttcatcgaatcatcaatttcatcgctactggtattttcatcataaacatccccaactaaaaaaatcatatctggtttaattttctcagcttgcgtaacaagctgttttagatctactgttttaacagctgttcccaagtgaatatcggaaagtgccatgatctttttatccttaaattccttattaatacttacttggtaatttgtgattacaatattatttgcattatatatcccataaacactcaagcttaaactacaaataagtactccaataagataaactttttgatatggtcttttcaattttgtcttaaatataagcgggtaaattaaatccgcaattatcaaacaaatacacaaattgattaaaaatcctaaaattatcatttcaatacttacacttacagcaactaaaacaataattactgctgcaacaactctatgcttatttaaatattttttaaaatgatatgcaataaatatattgatcaagatagcaattactaccatcattacggttaaaatcaaaaactatccctcctttaagaataaattataccacagattatatttatggtataataactccgaggtgaaattatgcataaattagcgtgtccaaaatgtcatgaatcaatcgttcaagaaggaaattcatataaatgtgccaataatcattgctatgatctagctaaaactaaatatttaaatttgttattaaatcctgataaagctacaaataaccctggtgatagtaaagaaagtttagttgcccgcaaagcatatctaactaaaggatattatgatgtcattttaaattcagttattgactgtataaaaaaatatcgtgatgataccccactagatatacttgatctcggttgcggtgaaggatattatactcgaggattaaaagaaatctttagccaagacactatttatggattagatatatctaaagaagctatcaatatggccactaaatatactaaagatgtttattggcttgtcggtaatagtaagaacttacctatcgttgatcactcattagactttatcacagctctatttacagtcgtaaatcaagatgagctgaaacgtactttaaaaaagggtggttatattatccatgtaactgccaacccaaatcatctaattgaaataaaagaattaatatatgatgaaatcaaagttaaaagtgacaaatatattcgtttagattttgaaacaattgaaagctatgatctagttcatcaagtaaaaattgataatcgtgaagatgctttaaatttactaaagatgaccccccattattaccatataaaaaaagaacgccggggcgttcttgatgaattagaacgattagatattacaattgatattaaaataacaatatatcaaacaagcatcgattaaccgatgcttatttttattatcagtatgatttgaagtcctagaagtaaaggtattccatacttaaaaatatttttcctagtcttatgattaaatccatacatcgctaatatcgctcctagtgaaccaccaaacaaagcgcctattaatagtatcttctcagaaactcgccaatgatgatgaattgctttatacttatcaattccatataataatatcatcatcaagttaattataattatatagctgattaataatttcatcggtcttctgttatctccaaatagatatcacgattcccctaacaacatatttcaagagaacctattaaatttttatagtgtttctttgcattatattaaatcattatttcatcaaaatatttcgttatttaatactatttttatcgataaaaaaaacgaaccatcttaacaacattaaaacgacttttttcaaaaagaatccgcgcaggaatccttttttcatcaccacaatctaaaaagataatatctagaccctttttagtttcttcgtaaccgacaatcgttacccagtgccataaatcatctcgaatcttacgacgtcgatgtgttaagatcaataatcctaaaggattaccatgctcaatactctctttaacaatttcactagcatcataaagtcttggacgtctaaaaatacgatactcacaattatttaacaatttactcaatcgtcttgcatataaaaagacatacggaaatccacgcttaccaggttccatcagcttgaacatttcattcatgtagtctaaatacgttgatttatcaaattcacgttctcttttcgtataatagataaaaatatcagtagcactaacacttgcacaaccagctttacgagcccaagagtcagcaaaccaatcttgattaccaccctgaccaatcaattctttctctttataaatttttggataatctaaaatcatcatgccaccttctttccatatctccattatacgttattatgtccaagttcgtcactaattagataagaaaaagaactaaaattaagatgactttaattctctcgtttagtgccactgctatcatatttaagatactcctcaatatcattacaacctataaccggactgtcgccttaagtcttacgagccaacacccccaatatagcagcataattaataagatattcatcatcataatgatgtgataaaccgtaaaaaacggtaagagaactacgattatctctaattctttaatcaataaacaatctttttctagcattcttaataaaaatggtttgcaactaaaaaagaagatataaaattttatttaatcatgttatctcctcaagctgaattatattcagcttatgattctaaatgtttaaaaattgagctaacttactgtcttggcagtgagccttatattcataaaattcattatttaccaaaaaattagttcttgatgaaaaaattgaagctgaaaatttttctatttatcgctttttgcatcaaaataattgtaagatctgttttgtaaaaataaaaaagccctttgggacaagagctttttttaatatctgtattctatacgggaaaacgaatactattatagatatttgggacacgtttataataccataatatcttattaatagttttcaaatagtgaaaatcaattttcatataatgaaaattttatcaaaaatcatctaaatagccacccatttcaaaatatataacactatcatcaatagatttgaaaacaactttaacatatttatcatcaaaataacgatatattttagcaattgttcccggagccatttcttgtttatataaaatacttacttctttaaaataatgttgttcaaatattcttagacccacagcatcaaatgcccattcaatataacgactattattcatatgttgatttacatcaacatcactatataaaacttgacgttccatgacataatccaatggcagttctttaataatttcatgatattcttcgatcgtataatcataagacttgatttctggcattataattcctgctttatcaggtttagtaattcttcgtttttctaaatctattaaagtccataatgagtatactgatgctatttcatcaccgttttcatcttcaacccaatagttacgtgtgaactggattcttttacaggctgcggcacgagtttttaatcttattttttcatctatcttaattggtctttttaaaattaatgtttctttagctaaaacaaaaccatatcgttcccctaactccggcctccatattcctacttcaacagcatttttagttgctaaatctgataacttggataataaagatgagattcgatagtttccttgataatcagcttcttgacattcaattgttaaatcgcaataagaaacaatattctccataatatctccttttttttatactaaaatataaatatcagtatataataactatataataaaacaaattaaaactattgtatagaggtaatcatatgaagaagatcaataaaaagagggtagcctttgcatcactggtaataatctgcttaatcataataatcgcacttattatcaatttaactatcttaccattatttaataattcaaacggtgttacaaaaaataagcaagctaaagcaaaaaaagaaagctatgatactgtatctctggttgctgttggtgataatattattcatgagcgtgtttttcaatatgccagcactaacggtacatatgactttaccccttgctataaacatataaaaaaatatattcaagatgctgatcttgcttttattaatcaagaaacaattttaggtggtgataccttaaaaattacaggatatccggcttttaattcaccaagtgaattagctaaaaatttaattgacactgggtttaatatgatcaatggtgctactaatcattctttcgaccgtgattttgaaggtgttaaagcggcttctcagacttggcgccaatatcaagatattatttatactggtacatacgatagccaaagtgatcgtgatacaattaggatcattgaaaaaaacggtatcaaatttgcacttttatcttatacccaaagtctcaatgaatataatactaatccttataagttgttaaaacaaactgcctatgctgtccccttattggaggatacagcagcaatcaaagcagatgttcaaaaagccaaagaacaagcagacgtaataatcgtctctgcccattggggtgatgaaaatgaggcggaagtaactgctaaacaacaagagtatgctcaactatttgctgatttaggagttgatttagtaatcggaactcatcctcatatcattcaacctgttacatgggtgaatggccaaagtgggaataaaacactcattgcttacagtttaggaaattttttaagtacaatggaaactcaagatacacaattagaaggaatgttatcattaaactttattaaaaaagatgctaaaatttttatagatgacattacctggacaccactaatcaatcatttcggtgataatactgttgaagtttatcctcttgcaaaatatccagatgataaattagctaaacattttgttttacatgataaacctaacattattcagcaatacaaagccaaaacaagagatgttattggtgataaaataactataaaggactaaatccatgaataaaaaacgcttaaataaaaagaaagtattattagtttttattccccttattattgccggtactataatctactggttcttgcctagtaattcaaccaaaacagaagaaaagcaaccgaaaaaaacagttaataacgatccccaatattatcaaacttcgttaaaagaacgttatgaaaactatcaaaaaactaatcccgatctttcgacagaagaaataattacccgagttaacatgaatcttgattatcctttctatgaagtaatcattcctcaaaataagccattagaattaaatacaatcgtaaataaatattataaattagatgataacttcactcccgacgatcttatttacatcaatgatacttatgccaatacaagtgatcctgcctataaatatcgaaaacatcagatgcgaaaagttgtttatgatgattttattgcattaaaagaagcatgtaaaactaaaggctttaatctatacgtcgttagtggctatcgttcgacaacctggcaaaccgaaatctataatcatatggtgaatacatacagcgttgctaaagctgaccaaacttgtagccgccccggccatagcgaacatacgaccggtctagcttgtgatattgcacttgataattacagttttgaagacgttataaagcatccccaatatcagtggtttcttggacaactagctaactacggctttattattcgctatccagaaaacaaagatacacttaccggatatagctacgaatcttggcatcttcgctatttaggaaaagatttagctaaaaaagtgactgctagtaatttaacatatgatgaatattacgcacaaaattatgcaaaatagcctgtttcagtactcaggctattattttttcactaaaatttatgatgattattaaacttttatcaatttttatataggctaattcatgattttctagtataatagagatattgaaagaaggagtatgactaatggatattattacaaatgtattaccttttttggtatttttagccttattatggtttacatacacaaatatttctttagcagtagcaatgtatcgcgcaaaaaaagatgatagtaccctatcatcatgtctaagcaatactggtaaatatttttacattggcctaacaattttctatattgccttatttgtggggagcgttgctttaatggtattagcgctaatcaacaataaattagacgacctatatttaccactaaatgtcttaacgatcggaacactagcgattggttttcttttacagcaaatcatcttagttgggcaccgtcaaatgatgatcggtaagatcaaactggattatcgtaaaattaaacgtgtttcatatccaaaagcaaaaaaattaagatttgtttatggacaaagaacttatgaaactccacttcgttttattgatgatttcaaactaaaaaaagctttacaaaaagctcgttaaactcttatgggtagcaaaaaatgctacccttttagtttacaatttaatttgcattgatatccttgcaattcgattataaaatttctcaaaagaatcgttccctttaaaaatatgattaattatcttcccatcctcaacataatacatttctgatgcatatgatgcaaccaagcaatcatgagtaaccataacaatcgtaataccatatttacgattaatctctgtaaaatactccattaattgcttagccctaatactgtctacgttccctgtcggctcatcagcaaaaagaatttttggcttacatacaagtgcacgagcaattgcaattcgctgctgctgaccccctgaacattcaaaagggtatttatctaaaagttcttcaatacctaaactgctaattatttgcttgatttctgcttcattgataatattctttttattaagttttaaagaaaataaaatattgtcaattacttttaaagaatctatcaaattataatcttgaaaaataaatcccatatatttctttctaatatttgctttttctttatccgacaacccaactatattctgatcaaagattaataattttcctgaagtagcctcatcaattgttgatagaatatttatcaatgttgttttaccagaacctgaagtccccataatacatgcaaaagtccccttatttactgaaattgaaactccatttaatgccgttttaggatatggtgtatctaagccatacactttttttaaattagccgttttaattatttcttccattttcttatcctcatttcctcttgatatacagcaactcgatatgaaataaacaatggaataataagctctaatataagaaataatgcagacaaaactcccattttatcacgatagacaaaagcaatatttaaatttgataaatataccaatgataagaccgcaatcatttcatacatcaatgttttttctttttttgtcgtatatctgatttcttcataattaagacctaatcgacttaaattacgataatattgctttttattaatttgattaattctaaaacgattaatcaatgtaaagcttaaaacaatatttgttagcacataccccaattgaaataagatcgtatactgtaaatcatcaagattagtacacatcattgttaataaaattgcagaagataatacaaacattaaaataactgatttcatctgctgcagattcaaaataaagttattaaaaattagactttctttagcatcaatattctttaatttaatccacttttctaataagttaggaaaacacataacacctaaattatatgctcctattacatataaaccggctggaaaaatcaatccctgatttaaatcactgatgtagatagtaaaagtacctataataaataatacaatataattaacgttagctactatcgttattcgccttcttttcttaaacgagacgatttcattatttttaagtaaatcaggaataaccccgcggatagaatacgatatttgcataaaagtcataaaaactaatagaagcagtaccaagggcaaagaatcgacatatgtttctaaagcataataaaagatattttcactaacccccatataaagataagcaagtgcctgacataatggaatcagcaaaaaactaattcccacagcaataaaataactaattaaagtgatcacaatcaactgaatcatctgaaaaaataaaatttctcgatcacgacaccccattattttcaatagaccaacaatccgtgaatttgttttattatagtaattacaagaatacattattaatgaaataaaaatcactaataaaataatgaccattgtccctttatacattccatcataaaatcgcatcacttcgtattcagtaattgcttcataaccataaaactttgttgtatcttttaaaatatttactaaatagttaattatgggattattaaagaattggagaaaaataatacatacacataaagttattgtaattgtaattccaagatttaaagctttttttcgctctttccatagcatctgtaaagaaatctgcagcatcccaatccctccttttttattaaaaagatgctttaataatatccttttcttcctttactctaaactattgtctaagcgtatagtcaatgtttttaaataaaaaacgattaaaaccgtacactatttttagtgtacgattttaatcacttcgtttacttaattctttttgttcacattcttttatatcatcaccaattaacttatgacgataatatctagatttctttttgacctcttggttaatctttctataaccatattgttcaatcaaagttttctcaccagaaaaaagattaactcctaaacctaatttgtttccatctatttttacccccattgctgctaaaatagtaggatacatatcaataattgaaaattttcggtttttattaaattttgtagtaactgcactattaataaagcagttgtatggtgtccgaacataatcgtgatcaagattagtaaaaaacttttctgacatactattatgatcaccagtaataactatagttgtattttcataccatggctggctcttgcaccaatttataaaattattcacttgttttgattgacaggcaattacgtttgcatattggcttttatatttatgctgacaatcttcacatacatacccatcaggtgtatgcgtatcaatcgtgactagctccatattaaaaggtttaccacttttagccaatttagtaatatccgctttagcaaactcaaataactttttatcttcataaccccaaaaaacaaaataatctttagcaattcttccttcctcaactgcggtattgtaatcggaaatataatagttaccatgttgtttataaaaatttgatgtacacccaaaattactatcagaacccatcatgatttcatttatataaccatgctgttccaaaatttcaccaagtgtataaacaccactaaaaaaattcgatttatcattatatgattttgaattaaatggtactaacagcggaattcctgcttcttggccaaccattgaagcaatcgtccactgtgttccctctaaggtcaaacttccaccgatttggttatgatgagaaaagttaatattttgattcgctaatgcatcaagttcaggcatataagaaacatcttgaccaccacccgatgtttttgctaaataagcattttcgatagattctaaatagatatgaataatatttcgtttacagcttggaaaagttaacgttacccctttgggatcaacataatgttcttcatataattgtgtttttctaagcatatcaaaaacatatccaaaaatttgataattatacaaagcaaagagcaaagaaccaataattgcaaaacagccaattgcaaatatatgcgctattaaatatatatgaaatgctggtaaaggtagattaaaaacgattatttctgtgaatgcaacaattacaaaactctgaggaactgtatgaagaaaccagtcagtataaattccatcatctgtaccatccataggaacttttaaatgaaaaatcatttgatttaatgtcttcacagaaaaagttcgatttccccaaataattgaggctacgatcaaaactgcaataaatatcatcaatgatccaatcacttctttaaatgtaattaactgtattattctttctatcatcacaaccatctttcttcttattatttctatttattctagcatataaatagacctaaaacaaaaatttcattcaccaaactttaccatatttttacatttaccttactcttcttatgtgaattttaaattaataaagtatatttttattagataataataaaatgactaatactatatttattttacaagagtaagcttaaattcttgataatgcttagaatcgactccgatacaaattgaaacatcacctggttcaacaagatatttcatttcataattccaaatagcaaaagcatctgaagttaaatgaatacttatctgttttgattgataggcttgaatttttactttattaaaagccttaagttcaattactctagaaacaactgaagcctgatgatcctttaaataaacttgtattacatcttcaccatcataggtactgttattgtatatttctaactgcaaatcaattccattttcaagtaaatcggttattttaatggctttaggtaccttgatatctcgataaataaattgtgaataacttaagccataaccaaaaggtaacagcgcttcaccgggcatgtcaacataatctttttgtgctccattatgtttatgattgtaataacaaggtaattgtcctacatgttgcggtatagaaacacttaaatgcccacttggattataatctccaaacaagacatcagcaattccctcaccgcctctactaccaggataaaaacttgctaaaactgcttgagaatgctttagaaccgtatttatgacgtgtggcctgccttgaatcaatactgttactatgtgtggattcacttctttcaaagctaataaaagctcgttttgataaccttctagttctaatgaagctaaatcaatgttttccccacaattcatttggttttcttgatttgcttttaccgcaccattgttttcaaaggtatcttgatataatcttgtactattaccgcctaatactaaaataacaatgtccgccgctttagctgccacgagtgcgggctcaatatcgaattttcttccccgtattgaacatccctgtacatagataggggaaatttctgttttttggcaaataccatcgtacactgtaacaatatcacttttgttttgataagcagtatagtctccaagttgatttaagtagtggttagcatttggaccaataacagcaattttttgttttgaggataatggaagaagtgaatcattatttttcaataatacttgacattcccgagcggcctgaagtaataaatctgatgcttctggtaatgaataagtatttagttcttcccataatcctaattcttcttttaatctcaatacccttaatactgcttgatcaagttcctcttcagttaaataaccttgttttattgcttcatctaatcgtaaataaacattatcccataaactcagatctactcccgctttaagtgctaaactgccaacttttaagatatcatcatccaacaacaataatctatctaaagcacatccgtcagccataacaataccagaaaaatcatattcttttctaagggtttcaaaaagcaatgctttattaatatgacaaggaattccatctatttcattatatgcagccataactgccttagcgccagcatcaatcgctgctttaactggtggtaaatgaatttctcgcaactcccgaggtccaattaatgcagcatctgaattatgtccacctacacaacccccttgcgcacataaatgtttgacaactacagctacaccgttcttttctttttggaatccatgtactgctgcacttgtcatacagcttgttaagtaagcatcctcactaaaacattcctcactacggccccatctaggatctcttaaaacatcaaatcccgtaaataatgccaaatttccacctttggcagcaagttcctggctcacattatgcgtaattctttccatcaaatcaggattccaagtcatccccattgctaaattagttgggaataccggtgcccctaatgccatatgtccgtgcacacattcttcgctaattaatgctgggatttcaaaacgtgaatgtttttttatatattcttgaatcattgtaatgacaattttactatcttcacggctaattccattttctctattgatctgagaccaggcatcagcacgtaaaatgccataaattgctccaacgccaccatattccttaacatgttctttaaataagtctgttaattcatattttccattaactttttgataacattgccatccatataaatgttgatttaattgaccaactttctctttcaacgtcatctcttttacaattttttcaatcatctctattttctcatttcttataaatattttttattatataagtattgattcattaattctcttaataaatattctattgctaaatggatatgcaaacgtgaatcaatatcatatccttcatccttagttacagaaacattcatcacataatttgacagtttcgtcattggggaatttctcgtttctgtaaccaataatattttacaaccactaagtttggcatttttcattacatcgataattgcctcagtagcaccacctcttgatagcacaattacaaagtcatcctgagtcaaattattagcttctaagtataaaaaccagtgatcatcaggataaatcgttctaattccatataaactcaacttcactgctaatatctttgcaacatatttgttcattcctgaagaacagattaaaacacttttagctttaacaatatccttaatgacatcatcaatatctagattgcgtaacatctcaatcgtatctttaatttctttttccaaggaatcacatgtactctcaactggagattgatactcatattcgtctcgacgatgatataaaagatcatatctaaagtccataaatgttttataatccaatttctttaccatcctaaaaatagtcgttgtagatacatttaatgtttctgctaaagaagaaatcgtcaaacttggttctaaatcccgaaacgttaataatttattaaaacattcaatttctaattctgttaaattatttccatatttttgaaaattcttaattaaactcatatgcattacccttcctatatgaaaatagagtagaaaaaatctactctattataacagtaacgaaagtatttgacacaatatttttgatgattacctttccattttgattttcaacttctgtttgtttattttcttgaacatcacataaataacatcgtttattaataggaatgaaaagctcaacatctgcgacatctacttcacgattatttaaaatccggaagatagaagcttcactattttcagcttttttcaaagccataaattccactcgttcatccaacgtaatcgcactataagaccaatcaagttttaaattttcacgtctacttatatcattaagatagcgtgtttgaactggtgtatttattacttctgctgtttgaatcatcttactcatctgttcttttgttccaaaaaacaatgaatattcacttgttatagtttgatttaataattgtgaagatggtgcatccatacgatatccggaagaacgtccaggtctaatcaatagatccgctttaccaaattttcctacacttcttaataaggttaaacaaattttttgattattttcaatttcatattccaatggtcctttacttaatactgccataattgatttttgatgatctattttaacaaaacgctgcattgcatatattggcagaacatactcagtggcaccatcttttaaactcttttgattttttattacgttttgacggataattgttccaaattgatcttgactacagttttctgctgctttataaatatcttcaaaacatactcttacgatatgatcacatgaatgattattaattttagttacgaaatctattgtttgactgtttgccttcaaagagacatcgctacatattttaaggggttttaatgcttgtacacgatggtgatcaactactttttcaggaacttgaatttgatattcaagccgatactttacttcaatagaagatgattcaatacaagtaatcattggatgaatatcattaattcttatttctgtatcatctatacatggagaataattatattcatcaccatcatcccccttttcgacaaaagtatttaactgatgatatgtttcctgagtctgtttattcgtaacagaaagcgttccatcttcttgaatgtgcatcactaaatacttattttcagcaccattttttaaaatgacaacatctccttctggtctttttgaagttctttcatggaaacacacttttaaaacttcatagcccattggtggtaagaaagatgccgcaatcttaatttgtactttaaattttgttccttctaaaacttctcctgcatcatgaaaattttccattccattataatattcaatatcatggctagttgctttaacttcattcattatttcataagggacgattgttccatcttgacgttttaacacaaagttcttatctttaacaatcatgcttgtaaaagcataatcattacgctgataaggaagagtattaaatagaactaagatgtcctcattttcctttagtacactcaaatccactgattctgccaaataacggaaattcatccagattagctcatttaaaccatgtcttaaatttaataaacgattttctacagtatggttaatactatctggtgaagaaccatagatagaatcatgaaattgattcttaaaaataatcttccaaaaataattaattaattcttgatcacaatagcctccttgaaaacgcgagatactaatcattggttcaattacttttgccatcattgtttcataatgacgcattgcattttttatatcaattctagttgaggtgataccagcgtgaattcgacctagtgcagcacttcttgcttcaccttgataaatttttaattgatgatgatttttctttgctgcattaagcagtgtatcaagataatcctcagggttattcataatacagtcataaccatctttttgcaattgttcaattgtctttgaagaatgtttccgtggaaaagcatagtcactccccagcataaataaaacttcttgatcttgataacgagcttctaatttaggaataaaatctgtcatatctttttttacttcttcataatcctctggaaatcctcggtaatgcccatatcccaaagcaaaatgaacagttggcagcgatgcatcaccatttccttgccacataaataatgaatcatctaaaacatcataatcaaaaccacgccaagcaaatatccctttcataccaatttctttaaatagataaggagttatcttattttgcccaaatgcatccgggacccagccaacattcatacaatgacctaatcccgcagcatatttagaaccaactaataagtttcttaacagcgcctcacccgagggaataatcatatctggttgaacataccatggtccaataaataattttcgattctttactaattgcgaaatcctatctttttgaaatggtttaatcgctaaataatcttctaacgctgctgtttgtccatcaaatgtaaaatatttcatttgtggatcattctctaacatttcaatcagtcgatcataaaaatagactaatttaattcttgatgaatccgttgaacgtaaccactctctatcccaatgaacatggggaataaaatgtatcttactcaacggcagcaccttcattctgtgcttctaaagtattttgcttgatttgtaattttacaaacggataatataaaactaaatctaaaataaataatactatacataaaataactggactcaatgtaaatgcccccaatacccaagcattaacaaagattggttccaccccagaattcaatacaaccaaatggttaactaatccccatgatgttgcaaaatatccaataattgcattaataactggtacaaatacaaatggaataaacataattggatttaatacaatcggtaatccgaatgttacaggttcattaatcccaaataaaccaggaataattgaaacctttccaatcgatctctcagcagaaccttttttccctaatactaataataatacaactaatgctagagtagagccagaaccaccaatcattgcatagacattacataaagtatttggtgctacttgtgtaattttatcaaaagaacctgtttcaacaaaaatttgaatatgttcatagaaaattggcatccacaatacagaaattaatccccacataattgaaaaaccatgaactccaaagaaccataataattgcataattataattactaaaataactgctggtaaacctgtaccaatcccatttagtggagtaataataaattgagtaatcaattgttggattgaatcaaatcctgctaaaacaacaatttcctttatcactgaaaatacagtaatgataacaaagaatggaataattgataagaatgaacttaataccattggcggtacttgtccgggtaatttaattgtaaattttgaattaactagtttatagtacatatatgatgaagccaatccaataatcattcccgcaaacattccttcataattaaagaagttgatttgaaaagctgtaattgtactatcacctacattaatagcattaggaatagttgctatataagcaatcaaagaaacaatacaagcaactaatggaacacatttatctcctttatttagcccttttaattgattagcataattgtatgaagaagcaataacaacaactaatccagttaaacccatagccacagtattaatatttgtaaaggcattgataatacttcctaaaataccatccaatgggattccccattctccaaaccaataatttgcctgctgacttactagacctgccaacgaacctaccacggtaaaaggacttgtaagaatacaagcatctttaattgcattaagcaatttgtttgatgtaattttattagaaaatggcattaaatacttttctaataatgacataattaatttcattttatttcctccctctttcatataaaagtatatacaaagcgcttccataagagaattacagaacttgtaaaatttttcctaatcaaaaaacaaaaaaagaagatcgaaatcttcttatcatttttctattttatcatagatattatttattcaaaataagttttgattacaagctccgcaaataaagaatcagcccagcagaaccatggtcttgtaaactgagtatcatcatttacatcaaaactttcatgacaatatccagtacctccggtattatcaataatagtctggatcaatgcttctctttcatgctgtaataaacttgttaatccttgcatagatagcgcaatcggccatatatattcagaccaggtatgtggcgatccaattccctttgccctgttcccctcaaaataatatggattctctttacttaaaataaacgctcgtgtatttttgtaaatttcatcattagcatccgcaaatcctaaatatggaattgacaataaacttggtacattggcatcatccattaatacatgattcccataaccgtctgtttcataggcatatattttcccatatttagggtgtctaacaataccgaataattcaataccataatcaatttgaaatttcaaatcaacaattcgctcttgaagatattcatcctgatacactaattccacaatttccttgagatatcccagaacaacactgcaaaacatattgccaggaatattataattaaaagtacatgcatcatcacttggcctaaatgcgctccaaatcattccggtataacgtgtttcaaaaccacgtcctttattttggagggtttcggtttttcttaaattccatttttttgcttcttctcgttcaaacgtatatgatgaattttgactatgattttgttcacattcaaaaacatttaaaagagttctaataaaatgtaaatactgttgattaaaaatacttttatcaccagtttctttataatattgataacttaattttaccggataacataatgaatccaattcatactttcgctcccagacatacggcttcataatagtcgtatcatgatattccctttcaacatcttctgtatttaaaaatgcatttgcataaggatcccacaaaacatattcaacttgagctttaattaatcctttgattattgactgtaattcactatcattatgaatatattttaaataatgattaacttgacagcttgaatcacgtaaccacattgcattaatatctccagtaataatataagtcttatcaccttctcgtttaacacttgtttctagcgtagacaaaaagcaccgtttaaacatttcgcgtaacttttcatctttcaatactgtatcagcttgttccaataattccttaatcgtcataatgctttcctcctgtttcaatcatagctatctttccttaaattgtctattcccaatactgtatattttttacaagattaatcaaataaaaaccacgcctaaaagacgtggttttctctgaggctataagcctatgttgcctgctcgcgtctcaaggcgctgctttctcttcgttcaagctatcgcttttgactctcgccatccctcaaagggatttatttcctcctttctccttttgttatcttcttctctcttttttgttttctttcttcatttctttatcttcaaatggattttgatattcttttacactcaatttatccattgctatatcatgtccctcttgttcccttatatattttgcgactgtttgatcatttagtcctactgtactcacataatatccttctgaccaaaaatgtctatttccatatttatatttcaaatttgcatgtcgatcaaatatcattaatgctgacttacctttcaaataccccataaatgatgatacacttaactttggtggtatcattaccaacatgtgtacatgatctgacatcaaatgcccctctataatttccacccctttatattgacataatcttattattatttctcttatatcatttctaagttgattatatatcacttttcgtctatactttggtgtgaagacgatgtgatatttacacatccacttcgtatgtgccaatgaatttgttttttgtgccatacttaatcacctttcctttcttataatgacagcttgaacaactccattatatcggaaaggtgatatctttgtataacttctttattgctccacccgcatagcaggtggttttttatttcgcatacttcgtatgctcaactgacttaagtctatatgttcaaattttcaatttgaacaggtaaacaacaaaaaaattggcactaaaagtgccaatatatatctaagacattatctaattcatcttctaataaatcatcatccatactactcaattatcttctttaattttttttcaaattcacggcgtgggaacattacaatcgctccgcatcccaaacatttaattttaatatctgcacccattctaataatttgccattgtgttgactttttgcatggatgagccttcttcatttcaacaatatcatttaatttatattccatattagtcaccatttctatgataaaaagcttcaattgtatttttcattaacattgtaatcgtcattggtccaattccccctggaactggagtaattgctgacactttgtctttaacatcatcaaaatcaacatcaccgcataatttgttattttcatcacgattaattcctacatctaatactactgcaccatctttaacatactcatgattaaagaatttcggtttccctattgctgcaataagtacatcagcacgtgaacaaactgcctttaaatcttttgtctgactatgtgcaattgtaacagttgcatttttttgtaagcacaataaggctaccggcttaccaacaatattactgcgcccaacaattactacttctttacccgccaaatcataattaatttcttctaataaaaccatcatcccttttggtgtacaaggaaccaaactatgttgtcctaaaaataatttagccacattttcgggatgaaaaccatcaacatctttactaggaacaatcgcatctaaaactttttcttcattaatatgctgtggcaatggtaattgcactaaaattccatcaacagtatcatcattatttaaatcattaatttcttgtaataattcgatttcactaaaagatgcatcatgtctcaaaatttctgattcaatcccaatatactgacaacctctttctttgttcctaacatatgtctgactagcttgattatcccctactagtattacaaccaacttaggtagacgtggatatgtttcttttatcttacttacttcttcctttaattgatcctttatttttacagatatttctttaccactaataatcactactcaaatccccctttaattattatttcaattataccaaaatataaacttgttgcaactcttagtccaactgatctaaatattcttgatactctttcaaaataatttcaagttcttcaaaagtattaatcttagataattcatttttcacacgagctgaagactttaatcccttgatataccatggcgcatggccacgcatttgaaacatagcaaccttttctggttcaatttccattaaacgtcgtgcgtgtgctaaacactgcgtaattttttcttgataagtaggttcactaattgtttcaccagtttttaaagactctacaacctgtttaatcaaccatggatttcctaaggccgcacgaccaatcataactgcatcaacttttgtttcttcaagcattcttttagcatcctcaacactcttgatatcgccattgccaattactgggattttcacagcttctttgacttgacgaattatttcccaatcagcatgaccttcatacatttgcgaacgagttctaccatgaattgcaatagcactagcaccagccttctcaattagttgagcaacctcaattgcattaatatgttctttatcaaaaccactacgtatttttactgtaacaggtttagttacattatcaacgacacctttaacaatctcataaattttatcaggatataataataatttactaccagcatcggcctttaaaaccttatttactggacatcccatattaatatcaataatgtcacaattagaatgtttatcgatatatttggctgcttgaaccattgtttctacttcaccgccaaataactgaatactaactggatgttcgccatcatctacttgtaacatttctattgttttagcatttccataacatagcgctttatcactaaccatttccgaatagacaagtccggcaccaaagtctttaataattttacgaaaagccatattagtaatccctgccattggtgccattactactggattttctatttctacatttcctattttaaacattatgtcactcctcaaaagtatcttatcaataaattaaaaaaaaagaaatataaatgtataaaatatttcttcatagccatactatttatagataacttacccttccccgctattttcctccccgaaatagacgtaagttatcgagttagttatattcctaaatatgttggtttccaacaaaaaaagaaaggcttcccccgcctttctttttatttttctttacaagtaagtccacctttttcttgttctttaattgtttcttctaaagaaatatacacgattttcttatcactatcagtagttgtaactaatttagcttttttaagttcatcaaaatcagcttcaccataatctaattcaattttaagaataattttttcaccatctacagtatatttagctgaaccaccttttaatgaatcataatcaacattaatagatttcactttaggaagccaataagtatcaattggtgtactttcagttacataaccagtaaaatcataagtaactgtacttttcatgacatcagttttatcaccagttgcttcgatcgtaacttcagctgctgtcatttcatcaatatttcctttacaaatagtagtggttttttcttctccaccacatcctgttaatagcaatgccagtaacattacacttaatagttttttcatttgattttccctcactttatttgtctataccattatcatagcacaaaatttacctaaaaaataccataatagtacatttgtagcaaaataatcacataaaattacaaaaaatagaatagttttcactattctactataatctatttttaatttcttttaattcttcttcactaaattgatattttttattacaaaactggcaacttaattcacaaccatgatcctcatcaatcatcgcttgtaactcatccttaccaactgtaatcaaagccttacccattttttcttttgaacaatcacatttgaaaaacaaatcttgtttttcagtaatctccacatcatcaaatagctgctttaatatctcttcaggacttttcccttcattgatcaacttagataccggcggacattgagcgacaactttttcgatataatcaatatcttcttcaatagcctcaggtaataattgaataataaatccacctgaagcaagcacttcattagtatcatttactagtaccccaaccgatacaactgaaggagtttgttcactaactgcaaagtagtaaccaaaatcatcacctatttccccagtttgtagtggaactgatcccgtaaacggttcttttaaacccatatcacgaattacttgtaaagttccttcatgtccaactgctacaccaactgctaatttaccagtatcattataagtataatgcacttctgggttagcaacgaatcctttaatatttccatcaccattagtaaccgtcatcatagttccaattggaccgccaccattgatcacaactgtcattttctcttgattcttgttcatttttgccatcatcaaagtagctgacatcattctcccgattgctgcagaagcagtaggccataaattatgatgtttgcgagcctcatctactaaattagtcgttttacaagcaaaaacacgacagtttttactattaactaaacctctaactaaataatctttcatatattctccttataaaaataccatcaatgatgataatatcattggtattatcatacacaaaataataaaatagataaatatttttcttttcttgttgttcatcatttacctcacatatgaaaaaaagcggataccgcttttatttcatatcatctaatagatcatcagcatcatcaaacgatggtgttgttgtacttgaagcattagaatcatttgatgaatcatcattagagctactatcaactgttccatcatgacgatctaacatcttacctgtattaaataatgcttcaatttgttcaccagctaatgtttcatattctaataaagcatcagcaataattactaatttatctttattagcctcaataatttcttttgcctgtgcatagcattcatcgatgatcttacgaacttgaacatcaatttcataagcaatttgcccagaatgagaattattgtgttgtgtatagtcgcgtcccaagaaaacatttccttgttcagaatcatatttgattggaccaagttctgacattcccaattcagtaaccatcattcttgcaattctagttgcttgttcaatatcgttatgagcaccggaacttacatcaccaaagaaaatttcttcagctacacgaccacccataaatccagcaatattagcttctaattgagtcttagtttggaaatatgtttcttctttaggcgtcattaagttataacccccagcttggccacgtggcacaatagttactttttgaactttgttggcagcttctaaagttaaacctaacacagcatgtccagcttcatggtatgcaactagacggcgttctttttcactatatttacgagattttttcgcaggtccacccataacacggtcaactgcttcatcaatatcatccattgagattactttgtgatcttcacgaactgctaataaagcagcttcatttaaaacattttctagttcagcccctgagaatccaggagttctttgtgctatattactaaaatctacatcgggagcaaattttttgttccgcgcatgaacttttaagatttcagtacgagcattcttatcaggattagctacctgaatttgacggtcaaaacgacctggtcgtaataatgctggatctaatacatcagcacggtttgttgccgctaaaatgatgatcccttcattaccactaaatccatccatctcaactaacaattggttaagagtttgttcacgttcatcgtgtccaccacccataccagtacctctttgacgcccaacagcatcaatttcatcgataaagataatacatggcgcagtttgtttagcctttttgaacatatcacgaacacgaccagcaccgacaccaacgaacatttctacgaattctgaaccagaaattgaataataaggcacactagcctcaccagaaacggctcttgctaataaagttttaccagtacctggtggccccacaagtaataccccttttggaatacgagcccccatttgagcgaactttttcggatttttcaagaatgctactaattcttttaattcctctttttcttcatcagcaccagctacgtcagcaaatctagttgtttggtttttttctaacttagctctagagttaccaaaatcaaaggctttagcatttccgccaccttgacccatcatcttgaagataaagaacattcctccaagtaataatacatatggtaaaatactaataatgaccttcataaatacaccacgatcattagcatcaacaatcgtagtttcaatacccttttcatttaacaatccagttaatgattgcatttcagcttcagtattaggaatcgtagttgtaaattcatactctgttgatttaccatctactttctttgtatacttcccacttacatcaacgactaaacttgaaggaacaatttctacttccttaattttttcgtcttggactacttccacgaattcactatacttaatctctttactattaccctgattcatataggtaacaagtccaccgattaagaataatagaactacccatggaagaatcgattttaataatccattcttattactcatatactctccttacttataacaatcttcttttaatattccaacatatggcaattgacgatatctttcattaaagtcaagtccatagcctactacaaaagcattagggattttaaatcccacataatcggccttcatttcaaaaacccgaccctcttctttatctaacatagtgacaattttaacactattggctttacgttttaatagcatctctttaacattaaataacgtctttccagtatctaaaatatcttcaacgatcaagacatttttaccactgacatcttcctttaaatcttgcttaacaactaatgtcttggattcaacaccctcataactacttacattcatatagtcgaaagtaacatcagtatttaaatattttgataactccgccataaaagggactgaaccttttaataaaccaactaataggacttctttcccctcatagtctttatcaatgattgcccctaattctttacatttagcactaatttgatctccactgatcaaaatttcttttatatccttatgcattatctcactcctagtcgtatatgtttctaattttaccacatatatattgggttttgaatataaatacccaatattttttgcaagatgtggcacaagaattatcattccttggctattttcaacaattggccaagtatcccgcttacttttaggaattttattgtcaataaacaatcgcgaaaccttttttgttccaccagcagtaacaataacatcaccaggacgtgctgatctaatcgtaattgggaaatcttctttactcacatagacgccttcatttaaatgacctacttcacttaaataaaagtgctcatgcttatcataaactaaatgttcatattttaaacaatagctatggttatttttcaaattagaaacacatatattatcatactcttttatgaacctaatattaacaggcaaatccatattaatatttggcttattactttttatttgtttaataatttctttaatcaaagcattgctgatcaaagggggataaacaacttcttttaaaatttcataaataaatccatctaacagctctttaggaatacaagtataatcaattttatttttttgatgatataaatcaagataaatttgtaattgttttagcttactagcatatctttgattatgttcttgtgcccacttaagtaatttctctattttttcttcatcataatctttcaaagtaacatttcgaacataatcacgagtaaactcagtttgaaaatttgtataatcatcacgatattcaacattatgaccatgacaatagtctcttaaaaactgttttcgtaccgctaagcacggtctaattacagttactccaaatacttcactgatttcttggattcccagatatcccttagtgttatggcgctgtaactgcattacaatattttcaataacatcattttgatggtgggccaaaaccaccttttgggtttgatatttcattccaatttctaaataaaattgatagcgtagccgccgagcttgatcttggaaattatccggtccgtaaacttgtttatcaatttctcgaacataacaaggcaaatcatatcggtgacaatatgcttcaactgtctgttgatctaggtcactatcttcgcgtaaatgataattgacgtgacatacgattatttggtaaccagcttgattcatcatgtctaataatgccatcgaatcacagccccctgataccccaaggatatacagctcctgcattttcagcaaatctttaaaactatccatttaatcacctcaatatctttaccattatatcaaataattattaatttaacatatcattttcgtgactttttcactaatcaattagtaaaagacgtcatttttaaggacgccttcttttaaaattacttctttttgtcttactattcttttttatgttatttgttcttactgatgactttttttgtccttgtttcaagtgcttagctttatcacgtgatttttgtgtttcacccttttttttacttttatgtttcttttctggtattgataaatctttcattgggtaataagggttatccaccaccggaatatcttggttaataaatttttgaatatcttttaataatgccttttcttgaaaactacaaaatgtaattgcttctcccgatgctccagcacgagcagttcggccgatccgatgaacataattttctgcttgatcaggtaaatcaaaattaataacatgtgttaattcatcaatatcgatccctcgagcagcaatatcactagcaacaagaactcgaactttatcatttttgaagttatttaatgctcgaacacgtgcattttgagatttatcaccatggattccctcacaagttatttgcgccttaattagtttcttacataaagtatccacatttctttttgtcctaacaaaaacaattgcattatatatttgaggattttctaataacttgatcaataacttagctttatttactttatcaacaaagtatagcgattgattaattttttctactgtaacattaccactgcttatcatgattttaagcgggtcattcagtagatcactaaccaggtgtttaatttcatcaggtaaggttgctgaaaataacatagtttgatgacgacgaggaataaatcttaagatcttacgaatatctttaataaatcccatatccaacatacgatctgcttcatctaaaactaagtattctacatgttttaaatccaccaatccttgattataaagatcaatcagtcttcctggcgtggcaatcagcacgtcgatcccacgattaattttagtaacctgactaccctgacgaaccccaccaaagataactgctgattttaaattaacctgcggattcattgcctcaaaagtctcattgatttgaattgctaattcacgagttggagccaaaatcagtgctttaatagttcgtggatacttttcgctttcatcacgtaaatataatttttgtaaaatcggtaaagcaaaagctgctgttttccctgttccagtcttggcacatccaaaaatatctcttcccgaaataattgctggaattgcctgttcttgaatcggtgaggggatatcatatttcatttcttttactgcatttaataatggttcaattaattctaattcactaaatttcatctatttctctctcttaatcgttttttgcagtataacacatttattctaaaataactaattttattcacaattccataaattaacctcatctaatagaaatttcagctaaattctcactatctttttatactttttgaaatatagatattttaaaattttgctttaataatactaaaaatagcctttattatttagcagtgtattaccatgaaaatagaaaaagaaacagagaattagcttaaacagtaaaaaatattcaaacaaaataaaagtcgttatggagtgtgtagggtctatcgagaacttcttaactgtgcttaccagataaatcataaacgtgtccatcacattatgtacaacttaggattattcagtaagattgttgacaataccatagatagaaattttggtacaactgatgtttcctagtttaattttttttgaaaattaaagaataaaatgtattatgaaaatgaatttaaatgttttgaagaatttgcagttgttatagatgaatatatagatcattacaacaaccaaagaattcaagaaaaacaaaacggatatctcctgtaagatacaaggaaacatccatatgtattgcctagttcataaataaacatgtccaaaattatgggtacatatcgctgattcattcaaactaatgaagtccactaaattaattatttaccactttaataactataatacttatatcatctaaattatttttctctaatacttgatccattaaaaaagtagctatttcttgtgggtgctgatcacaatataagtgaacattatcattaacgatctgttcaaaatcatttcctgtgccatcacttgacataataattaaatcattattttttagcggcatctcataactaaccatttttaatttagaaacaactccaactggtaatgaattagttgcaattttttcaaccattccactacgaatatgataacttggattagcaccatatttgattaacttcattcgggcattagcaagattaatattacatagatctaaagtcgtaaacatgtcgttacgattttttatttttaataaagcattaattgaatcaattgtatcttttaatccaattccatttaaaattaattttgatagtacttctaatgtcaacttactttcattagcagccatcttgccttgacccattccatcactcaatgctaaataatgaagattatcttgatggaacgcgctaaacgaatcaccacaattaagaggctctaaagcatattgctgaaaaccatactgcaatgaataattttgttgatgttttaaaactaatgacgtgtaaccaagatgatgcattgaatcctttagagaaactatttctaatgtttcatttaaatatgactctactattggaactagttcactaacaacctcctcctcactaatatccattaatcctaattctaaagtataaacattattaccgatttgatgacggtataaatatgtaatattaaattgatagcctaataaatgctcttttaaactatcatcatttaatggcgtttgttctaaagaattgctaaaattatcaaacacctcactcaataacgaaaattcataaaacaaatctttctttaaatgcgaattttcctgattaactctttttatcttttcataactatccttatattcactgatactctttaagaagcgatttggactaatgcaattactattaatatagttaatatcttcttttgtgtagttagtcttaaatcctttattaatcaattttcctaatcgacttacattcccatcacgataaaaacataaatcccgactaggacatttggaacatacatcctcataaacatagccaacaaactcaccgacatttacattacgatttgcttcttgaaagatatctgttaattgtttaaataaagaggcgaatgtggtagcacgttgaattaatttgtttcgacttgtgatatttttaaaatcatcactaagtaatttaggcttatgtttaaaggtaggtacaaataaaaacaacgttgcgcttactacaataataaaactatgatagtaataatcatatgtaataaagaaagggagaactagatgacttacaagataaacggttgaacagactaatttattttccggcttatacataaagaaaatactaaaaggaaggattaatgatagtatttcctcttttaataagggattaataaacattaatatgattgatatatatagaatcgtaggcatggtactattaattcctaaataatagacacttagtaataaatagaaccttagtaatatcatcatatagacttgattgagctcaactaatgaaatgatggctaacattatcattgttgaaagaatcatcatccgtttattggtatatacttcaatcgtgttatggataaagagaggcactacttctaggtacagtagactatgtaatagtgtaaaggataatataactaatacttcaatataattatattgataaatgtaaagaaagagtaaacttaccaaagtaactactagggctaaatacttacttttgacaaattttaagtacatcatcacttgcataattatcacgctagtaatcgaaactaataatagcatatagttatcataagatatgtatgataccaataataaagcggtcatgtacataatgatatgtcgatagccgcacataaatgatactactagcatggggagaacaaaacacagtgatgtgtcatatatttttactaaacctagaaggagggttaatccaaagattgaaacataagtcattccagtattctttatttttgtttttgtttttgctactgtcaaatccatttcattcacctcgtaatatcgattatagatacttacagtagaataatttgtcactttttatttattttaaaataaaataaaaacttatagatttacaaacaaaaaaacaactagttttacaccagttgttataatcttaatttaaatccaatatcccccatgatcttagatgtttcatattgaacaaatccaagatttttaagcaaacgaatagatcttatgttgtcatcataaacatgagcaaaaacaattttaaaattatatctattttttaactccaataaaagtgctcgcatcgattcaattgcatagccatgttgccaataatcactatcaaaagtataaccgatcgtaatagaattagattctaagacctctaaaaaataatcacctatcaaaatattattttcttttaatactacacctaattgataattaccacgacttccatcaaaaggatgtttaacacaatactctactctttttaaggctttctggtaagggtaccgccaccatgattgatagaaagcaacttcccttttatcacgatattcactcaaacgcatagcatcttttatttccaactctctaattatcaagcgttgtgtttctagattttccatcaagccaccccgattcctctagatatcatatcataatatcattacctagtacaatcggtttattttagctcattattttatattttagcgtatttattacatgtttgaaggcaatgattggatgtttgaagataattctttttcctgaatatttcataacttctcgaatttgctgccgatatgttttttgatagcaatgaatcgggcatgatgaacaaaatgtcttttcctctttacgagggcaaaattcaattcgcttaaaagcataattttttaaatcacttaaatcgactttattaccatcttcatagattttaatcattatactaattaattctttttcttgatcaatcgtcattaactctgtctcccctgttctattttaataattcgatcacagatttttaatgatgaaggtcggtgactaaccataataatggttttcccttgatgattatcacttagtgattttaatactaaagcttcatttaagctatcaagattactagttggttcatccaatagaatcaatggtgcatcatgtaaaaaagctctagctagagataatctttgcagctgtccccctgataaagactgataaaggctcccgatcattgtttcataaccatcttttaaactaataataaattcatgaagattggctttcttacaagcttcaatcacagcctcatcgctagtttccatccctaatttaatattattgataatactatcattaaaaacatatgtatcttgggtaacataactaattaatttcgctaaagaatcactttgccatgttttgatgtcatgaccattaatcagaatttctccgtcagtaggatcatagaaacgcatcaataatttcaatagcgttgttttaccacttccacttcgtccttcaattccaatgatttcaccaggtttaatacttaaattgattttatctaaaatcgtttcagcttcatatttgaatgataaattatttatttcaatcgttcctaaattcccctgatatccattgattacagtttcaacttgaggttcttcagctaataagtcaagaacacgatttccacttgcaaaagtaataactagattatgtgctaatgaagataaagccaagactggtccaaatgatgccattaaagcaatcgtactaattaaaacgccattaaattcaattgatccttggcgatataaataatatcctaagataaacattgctagtgaaaataaactaacacaaatatctccaatcattcgatattgaccctcaagatcttttaattctttattttgctcatttaataactcactttttttatctatttcttttaggcgtttattaccacgggaaaattgatcaataattcttagaccatggacagactctagtacataactagtatacttaccataatcattccgataatttaaccccatatttcccgacttcttaccaacaattaaaggaataattacaccaataaataggtaagcagtgcttgctaaaagacctaaagcaaaatgataatatccaatatagataatcataataatcgaaacaattaaagcaatcatcactggggaaattgtatgtgcataaaacacttctaaaagttctacatcgctagtaatcatggctaccaagtttccttgatctttaccatcaagttttgctggtgctaattttctaagtttcgcaaaaacaatatctcggatcatcgctaataatttaaatgcgataaaatgattacaccattgttccccataacgtagaaagccccttaatattccacaagcaatcaataaatataataaactagtaaaagtctcatgcttaattactttaatcatgatttctcctgctattaccgttagaaaaatagcagccaagtagccaataacacctaaaataattgctccaagcatgattaagagcattgatttgactaaagcaatcaaactgattactacttttaaattactccgtttttgcatttgcctggcctccataattctcaatttctttttgggtattaactaactctatatattctggattatttctcatcaattctttatgatttccccagccaattaatctcccttgactaaagacatagttacatttacaattttcgacacttgctaaacgatgtgaaattaaaataacaattttttcatcacgcatctgctcaattactttcataattatttcttcactttcaatatcaatattagatgtcgcttcatcaaaaatataaacactagtatcatgcaataatgctcgggcaatacttaaacgttgtttttgtccaccagacaaattatttccacgctcttcaatttcactatccaaaccattaactccatcaaaataattccataaattaactttctttaatacctcaatcattatactatcatcacagttatcattcccatcacttaagttactgcggacagttcctgcaaaaatataaggattatgttcaaccattgttatttgtttcattaaactttgatgtttgacttgattgacttgatttccattgtagcttaaaacaccttgataattatcataataacccattaataatttagcaatcgtacttttaccactccctgagcttccaaccacaccataaataccaggttcatcaatttctaaactagcatccttcaatactatttcttcatcatatccaaacgacagtctagtaatttcaattttttcaatctcagtaatttctaattctttatgatcatttaccggtgtatctaataacctaaaaattttctcacttgcggcattaccattcatagcgatatggaaaaatgatcctagcagtcttaacggaatgaaaaactctgctgataacatgatcatcataaatgtttgccctaaatcaattgctccaccttgataactgtatagtgaaataataattcctagtgctgcaccaccataagcaacaagatccataatgctgatagaatttagctgcattaccaaaaccttcatcgtaatatttctaaatcgttgtgcttcttcattcatttcaagatgtttagcttgatccccttgataccctttcaatgttgtcaagccgcgaacattatctaaaaagcgttcagcaagattcccgtaaagaccccaatacttatttaataatcttttagcaaacttttgaactaagacgatcgataccggaattaaaggaacacaaacaaacaatactagggctgctttgaattctactcgtcccaaaataatgaacagtgtcagtggtgctaacatactatagaaaaactgtggcaaatatttaccaaaataaatctctaattgttcaactccttcgctcattaattgcgttaatgaagccgtactgattacatcactataatgattatttaataataatactttctgataaatatcacatcttagttttcctttaatattttttgcagctttaaaagaaaaagatgatactaatttaccaaaataacctttaatcaaaattaatacaattatgattatgactttaatactaaaattatttacttgatgcccctgataaagttcattgatcatattagctataattgcaacaattactacttgaccaatcaatgccagccactgcatcaaaacttgtaaataaatatattttttatcctcttttaaataactaactaatcttttattaatcattgctcacttctttaattgttttaattcgaaatgcaaaataataatacttaaatattactaataaaacaattgttatccttccataaatattatccatcattaaaaatgcaattaataacatcgtacttgcaaacgataacaacatcactttggttttcaatgtcatagctcttttagttacaaagtcatttaaatgattttgataaatttttgtcccttcaaaccagactttagcccgtgaagaacttttagtaaaaaagaacattgccactaaaagaaaaggagttgttggtaaaactggtaaaactacgccaatcattccaatccctgtaaatattattcctagcataaaatatagatatttcatatcgttctccttatgttatattcatctaacatactttaacatttacttttcatcttttcaataataagttagtctaatttaacaatttaatcaaaaaagaacttagtttctcaactaagttcactacttttaattatatctcttttttaataatgcaattccacaaagtcctgctaatgtagttattgcgtataatccaaggctcacactatcaccagtcttaactgaagttttaggtgtatcagctggtgtttctggtactggtgcaggtgttggttgttctgctgtttttccatattcagcagcccaattcataatactaacacctttagcatctttaggattgttatttaatgtatagatccaagaccagtgatcactatattgaactaatgttgctacaccatcttgatcataatcttctgcaaattctaatttattagaacttgctcctgtactaggatctgttactgctactgtttcatataaagataatttatattttccatctttagtttcagaagttgtaaaatcagaatttaaatcttgtttatgttctgaagtaattaattcttgtccatctgttaaagcattaaataaacggattgagcaatcttctggtttaacactgctatctgttttcccttgaactaaccaaattgcagtatcagaatttttaatacttgctaattctgcatcagttggagtttctccaccacgagcatctgctacatctaatgcaggacagttgatcattgcagcagcaaataaatctggataagcaatcaacattcttgttgtcatgtaaccaccagctgaacatcctgaaacaaacactttatcaggatcgatatttttagctttgattacttcattaatttcattatacgctttttctaataaaccatcattttgtgcataataccaagtatctggtgcttggaaagccataacatgagcccctccaaaaatattttgagtctcatctgtagcccaagcaactgtaccacgattagctaacatttgtgcaacattgttgccagaagataaataatcaccttcaccattaccatggaaccaaacaatcaatgagtctgcactacctgcatcataatattgataattaattccatcctttactttaactgactcaaatttagcagtttctgcatttattacagtattatcacaagtataattaccggtatatgaatcgttaataactgtaccatctgcagctgttaaagtaactggcttattttgtgtaaccgtataagttaattcagccggataatttctacctgaacttaaataagctaaagtggccccttcactttgattaaaatagatgtttacatattgtccttcaacttctactttaacaattttacggtcaagatcataatcaccatagctagtatcttgtgtaccttgacgaatatcttctgttgatgctttagcatgaacagtaaatgtatctaaccctacacctgtaacctttttagcagcaccatagtcaattaccatttttgatacgacctcacccgcatctgtcacttccccatataattgacagctataagtatctggagcatcaacagcaaataatggggtgcaatatgttgttgctactaatgcgaaacttacgaccatcgctaataatctctttaatctcttcatatctctttcctcctcgatatatttagtttatcaccctttctcattgaaagcgattacaaaaatacttactaagtaccataaataggtacctaaaaattaaaaaaactattgaatttaaaatctatttatgataatgattttaaaattgatacatgaaattatttttttaaatgatataattatattatctcaacgtgtagtttgcggaacgtaagtccagttgcagctacacttttttattatatggaggaatttatatgtacaaaattggcgataccgttttatatggacgtgaaggtgtttgtaagatcaaggatattgttactcgcaaacttaacaatatcgataagcaatattattttttaaccccattggatgatcatataactattcttgtcccaacagataatgaagaggctttatcaaaaatgcgaaaagtattatctaagaaagatatttatgaattaattaagacgatgccagataatgaaacaatctggatcaatgataaaaatattcgaaaacaaaaatataatgatattattaatcatgggaatcatgaacaattagttaaattgaccaaaactttgtatttaaataaacaaaaacaagaaaaagccggaaaaaaatttcatgttcaagatcagcattttttacaaaccgcagaaaaaatgctttatgatgaattttgtcatacactcaatttaaagccagaacaaattttaccatttattttagaaactttgaaagaaaattaaggagcatttatgtataaaattaataactatattattcataaaaacaatcatctttatcaaattatcgctattcacaatcacacttgcattttaacaacttggcaaaccaatgaaacaatcattacgaatatcaccgaacttgtccgaaaggttataacagcttctgaaatggaggaaattgttgaacgaattccatatattcgtactttaaacataactagtgaactatatcgacaagagctttaccaaaagtcactagataaatatgatgaagttgagtggatcaagctaattaaaacaatctatattcgtcaccaaaaaaaacagactcaaaattatgaactaaaatattttaaagcagccaaaaatatttttcatgaagaaatatcacttcttctaaatattccactacctaagattgaaacatacataaaacagaaaattttagaaaattaaaaacattgacttttatgagtcaatgtttttaattaatctaaatcagttccatttgaagcaataacttttttataccaggcaaaactttttttctttgaacgttttaatgaaccgttcccttgatcatctcgatcaacatagataaatccatagcgttttgacatttcaccagttgaagcagacactaaatcaatacatccccaaggtgtatagcctaataattcaactccatcttcattaattgccttatccatctctattatatgttctcttaaatattcaattcgataatcatcatttactgaaccatcagctccaattgtatctttggcaccaagaccattttcaacgataaatagtggtttttgataacgatcatataaagtatttaatgtgattcttaatcctaacggatcgattgcccaaccccattcactagtttttaaatatgggtttttagttccctcaaaagcatttccagaagttttttcaacatttccttgtgttgaaatacaacgtgatgaataataactaaaagaaataaagtcaactggattattctttaaaatttctttatcttctgtggtaataccaatattgataccttcacgttcaaacatttttaaagcatagtttggataatatccacgtgcttgaacatcaataaacattatattttcccgatttttattaatagaagcccaaacatctgcaggatggcaactatatgcataatattcgcctccagccagcatacatcctaccatattattagaatcaatttcatgagcaatcttggtagcccaagcgcttgctactaattcattatgagccgcaatatatttagcttctttttgatcttcgccttctttaaacatcagtcctgcccccataaatggcatatgtaagatcatattgatttcattaaaagttaaccaatattttactagacctttatatcttgtaaaaagaacagtaactaattttttatacatttcaattaattcacgatttttccatccgccgtacttcttaattaaatgaataggcatatcaaaatgagtaatcgttactaagggctctattccatatttatgacattcattaaaaacattttcataaaactttaggccttcttcattcggttcattttcatcaccgttaggaaaaatacgagtccaccctatcgatagtctaaatgttttaaaccccatttcagcaaatagtttaatgtcttcttgataatgatgataaaaatcaattccaacttgagcgggataatagtatccctcttcaaaatctagcatttctttcattcctaagcaaacaggaaaacggtctttaccatgaggtactacatcaacattagcaagaccacgtcccccttcattatatccaccttcacattggttagcagcagttgctccaccccataaaaaatcttttgaaaaagccatctttcattcctcctttttactatatccttaccttactataaaaaaagaataaatacttaatagttcacaaactgtgaactaaaatatttactcttggttttgttgcaatctggcaataatcaaatctgtcacaaagcggatatttatcttattcaatgtagaatcaacagagggaacataaatttttttcccagcaaaagcaatttcttgattgcaagttattaaccaagccttttgtttttgctttaatattttagtaattgttcggtgattatacattagtgtattaccattaacactgataattaaaaatacagcgtgatcaccaattcgatattcttttctaaaatcaacatctactacaataatcggtatttgaagtgcatccaattcaatttggatcattgaacatagtccttttgcctctccatgacctaacaaaaataggcaagaacaatttctaatatcttctacgagcatatctagatcattataattgatctgatgtactgtattggttaataaattattcattcgcacaactaaatctgaactattacttctaaaatcactatctaactgaaaatatcgatcctttaatccaagacttccgacatacatcgaacaactttcttttaactcagcaaagttatcataacctaattctttaacgaacttcgagaccatggctttagaaacatgacttccatcagctacttccttaatagttaaggaattaattataagaatattttgtttaataaagctagagatcatatatctaggatcactcgtttgactattattgataatatcgtttaacttattaatgatcatcatatcccacctttatttcattatacaacaaaagcacctttcggtgcttatttaagattacgataaataaataacatacgatcttttccattaatatccttaatgatttcatggggatcgttaggaaaatattcttgaagagctgcttccataagctcccgttgatcaaatcccatttcaaatgctaataaagcccgttcctgcaataatggctcgactccctgaaatattttacgataaaaatatagtccatcattaccaccaaataaagccacatgtggttcattatctttaaccattgcttcgatttcttgttcttgaggaatatatgggggattagaaacaaaaatatcaacctttatttcattttctaataatggctctaacatatctccaaccataaattcaatattagcacccagattctttgcattatctttagcgactgtaactgcttttaaagaaatatcagttgcgaaaacttttagacgcggttcttctaaagcaagactagttgcaatcgccccactacccgttccaacatcacaaagagtaatgctttgatattcagcaaaatagtcatcaatacgatataaaatattttccactaattcctcagtctcataacgtggaatcaaaacgtcttcattaactttgaaatcacgtccaaaaaagttttctacgccttttatatactgaattggttttccttgataatattcttccatacctgccaagaacttggcttctagttctgaactgacttcttcatcatacattaaatataactcatgcggttgtttatcagcaaggtgataaaacagcactttagcaacattaacatctttactagcatcatctaatctgctttctgctaatttaatcagctcttttacagttgccattaatgttgaccttccatttttaaacgttggtcttcattaatcaaagctgtaataatatcatctaattttccatcaacaatacgatctaattgttggatcgttaaaccgatacgatgatcagttactcgattttgaggataattatatgttctgattttttcagcacgatcaccagacccaactttactctttctttcactaccaacttgttcgtcatgttgttgctgataaaaatcataaattcgtgaaactaaagctttcattgctttatctttattatcgtgttgtgaacgtccatcttgactagctgccacaattccagttggaagatgggtaatccttactgcagaatcagtcttattaatatgttgacctcctgcaccactagcacgatatgtatcaattcttaaatcacttttattaatttcaacatctacttcttccatttccggcattactagaacagttgctgttgaagtgtggacacgtccttgcgtttcggttttaggaacccgttgtactcggtgagatccagattcaaattttaatttaccataaacatcttcaccctttaccatgaaagaaattaatgaatagccacctgcttcggcatcaacagcttccattacttcaactttccaaccttgagactctgcatattttacatacatccgatataaatctcctgcaaagatatttccttcatcaccgccagcagcaccacgaatctccataattacatctttattatcattgggatcctttggaattaattcaatttctaacttgcttataatctcaggtaagcgtgtttccaactccgctaactccattttagccatttctttaatttcaggatcactttctttagctagttctttagcatcgctgatcccagcttctacttctttatactcttgatataaatcatatgctgcttgaagtgatgactgttcttttgtaacttccgtcattttcttaatatcgctaccgatatctggatccatcagcatatgtcctaattcttcatatctattctccattgtttttaaacgatctaacatactctcattcatgatttatacctccaaacctctcatattatataataaacatactaaataagcaaaataaattttgtttgaattcatcgtcttttatttacattttaaaacttttaaatatttctaatattattatttagttcacattcagttcacctagctattttatgatattagtgtagtaagaaaactaccctccctttaatcataaaaacgaagacaagttactaacgtaacttgtctttattttgctttaggccgtactttttaaaagaaggttaaatttaaccagtgtgtctacttgacagcactaaaaccaaattaaaacctgcttctttatatttttataacccaaactataaaaatctctcataattagaatttatgcggtttattaggaacttgatggcaatgacgacatcttggttcataactttcatcagccccaaccatcacgatagggtcttcaaatcctgctggtttaccattaactagacgttgtgttcttgtcgccggggccccacatttagcacaaaccgctgttaactttgtgacaaactctgcccgagtcaataattcaggcatcacgccaaatgactcacctctaaaatctttatctaagcctgcaaccattacgcgaattcccttatcagctaaatattcacaaacttcaacgatatctttatcaaaaaactgcacttcatctattgctactacttcggtatcagcttcaattttctttaagatatcctgggctttttcaactactaaacaaggtactttagcaccagaatgagaaactatctcactatcagaataacgattatctattttaggcttaaacacaataatattcttcttagcatagcttaatacattgatgcgtcgaatcaactcttctgtttttcctgcaaacatacatccactaattacttcaatccaaccttcacggtattgatgatacatctaattcctccttaacttctaagatcacgcacgccttcacttgttccgtctggacccatttgagccaaatcagaaaaacggctataattcttttcaaaagcaagattaacttcacctgttgccccattacgatgttttgcaataatgatttctgttaatccattatcttctgattcttctccaggatctttataataatcttcacgataaataaacgaaacaatatcggcatcctgctcgattgccccagactctcttaagtcagacatcatcggccgtttattaggtcgttgttcaactgaacgtgataattgtgataatgaaataactggtacttcaagttctctggctaatgcctttagcgttcttgaaatctcagatacttcttgttgtcgattttctttatttttagaagcagttgtaatcaattgcaaataatcgattacaatcatccttaagccatgctcactttttaatttacgactttttgcaacaatatcattgattttaatacccggactatcatctatgtacatattacatttagatactcgttctgctgcggcataatatttatttgcatttgtttttaaaatttcacctgttctcatagaagaaccttctattccccccattgaacagataaccctctgaacaagctgttcagcaggcatttccagggaaaaaatagcaaccggttcctcagctttatacgctgcattatgggctagattcaaggcaaaggctgttttccccatcgctggacgtgcagccaaaataattagatctcccttttgaaaaccagatgtaatcttatcaagatcacggaacccagattttaccccagatatatttccatcaattttttggagtaaatttaaacgatccgtaacacttttaataacccctcgaatatctctaaattcaccagcacttcgatcttgagttacttttaaaatcgttttttcagtttcatcaataaaagcatcaatattttcaacatcaccataagcattttcagcaatttgagttgtctcgcgaataattcttcgcaatgttgctttattatgtaatatcttcaaataatattcactatgcgctacagttggtacagattcacttaatctaagcaaataatcaacaccacctattttatctagctggctatgatccataagataagatgttaccgtggtaacatctactggagtgccttcttcattgattgcagccattgccttaaagattgcttgatgactgtcatcataaaaatcatcttcaactgttttattcaagatatcaatacacttatcttttgaaataagcattgaacctaataatgatctttctgcctctatgtcatgaggatattctcgattggccatacatttctcctatcgttcttttaaatgaacattgattgttgcaataattcctttatataaatctacttttaatttagtatatcctaatgctccaattggatgagcatcaataaattttcttttatcaattttaataccatacttttctcttaattgttcaactacttgtttagtagaaacgctaccaaaagttttaccatctttacctgattttaaagtaaattctaaagtaatgctttcaatttctttagctaattctttagcttttgcttgattttctaaatcttgttggtgctctgcttctttttgactctcaacaattttacgacttgtatttgtttctaaaactgctaacttgtttttaattaagaagttttgtccatacccatcggctactttaacaacttctccttttttaccaactttttttacatcttgtaataaaataactttcattattcattcgtcctttcatctaaatattcgttgattgcttcctctaataaattaattgcaatcgttacatcttcatactttaattggcaagctgccatagaaaaatgaccgcctccacctaatttttccataattaactgcacattaacatcacgggtacttcgtgcactgatagatacctcttctttacctgtacgacctactgtaaataccgccttaactccactaatacctaatagctcattaccagcctttgctaacaatgttctactatatattttatcttgacgtccaaaagcaatcaagatattttcaccataacgatatgctgtttgcgtaattgacaattttgttagagtcgtatcataatcatcttctagatatttataagcttctgatacattcgcctgcatctcttttaatttagctgcagcctgaaatgttctagttcctacacgtgtcctaaaataattagtatcgatcaacattcccgcatacatgattgtcgcttcacgttcagtcacacaaacattttctttttgataatcaaataattctacaatcaactcaacagttgacgaagctgccggctctaaatacgtcagcaatggtaattcaataaattcctcaccacgacgatgatgatcaattacaactttatttttaattatatcaagtgcattagcatcgattgctaatgacggtttatgattatcaacattcaccagcaaggttttactgtgattaaattcattaattctagccggtgtaataaaaactccacgataacgttcatcatcacgcaggctccgagcaattaccccagtcttttcttccaatgaatcataatcaataatgatgtgtgcctttttcccataggctttacaaattgaatacattgcgattgaagcaccaaaagaatcaaaatccgattgtttatgccccataattaaaacattattagcctgacgaatcaatcccgctaatgattgagcaattacacgggcacgaattttatttgatttttcatagctttcactatttccaccaaagaaacgaattggttcatcatttgatttaactgtagcctgatctccgcctcgagaataagccagcgaaagcgcagaaaaagccagctcatcaagttcacggagaatattacttcctcgtccaattccaatagataatgtcatcatttgtcctaactgctctgcttgttctttaaaataatccaagatcttaaacttatcttcaacctgtttacgataagtcctttcgttaaacattgcaatataaccatcacttttatagcgtttcaaaacaattccattttcttttgcccaatctaatacgatctggcgtgttgttgattgaattgaagcagctgtttgttcatcagcctgttcaatcgactcttcatagttatcaaccgtaatatacgcaacacaaacctgctgatcttcaaactctttactaatccctacataatcacttacatcttttaaatataataaacggctttccttactattataaacctcaaatttacgagaattgatatcaatcaccttaatatcatcatcttcaaataaagaagctaataacggttgccattctaataattttttaccaacaatatttaatttcatctcagtaaataaatcactgacccaagaaatattccggttttcatcatatttaatcaggccgattccaccaaaaataaaggcatttttagcttcattatttaacgcttcactaacacttaaattattttcattagccaaacttgatgaataaaagataaatcctagaacaataacattctttataaatatatatgtagccagaactaaagatgtattactagaaagaaatacatatcccatcaaagcaaatataaattcaatcaataataaagcaatcactacattctttattcgtgtcatctttactgtcatttagctcaccacctctagaataatatcattatacattaattttactttcttttcatcaatttgcttacgattatatttgaatacacgcgaacgatgtaagattcactaataaatagaaatatccacagcaatgcaaatgatacttccggtgttagaatattttttaacattggtattaacgaaataatctctctatacatctcaagtccctcttgataaacattgattcctaataatcctcccaatagaaagaaaattaaaaagttttttattgctgaaatgatcattaagccatatttagaaaaacatttctgcttttcatgttttagacaatacccataaaatatccccatcactaaagtaaaagtaacataaaatgtaaaaaataattcaccaactaaaaataaaattacaaaagtaactgctaaaacactcaatcctgctcgatagtcatataaataagtataatatacaagcccaataaccataacataagctaaaacaatatcaaagatactcccagtataaagattaataactcctagtacaccaaataatgatgccaacatcgcaccttgtgccatgactttaactttattaccattcaccttaatttcctccttaaaagaaaaatgcccgcaggcattttattcaaaaatatgatagctcttttttccattctttttagcttcgtaagcagcactgtcagcttgatgataaatttcatcaaatatcactcgaggagtctcgacaaaagtgacaccaactgaacatgaaatatcaattttacttcctggacaagtcgttgctagtgcctcactaacctgttttgccttagaaataacatcttttttagctcctacttctttcatatagaccatgaattcatcgcccccaaaacgaccgacaacatcatcaccacggaataatgactttaatcgattagcaacaaaacgtaacgtttcatcaccagcactatgtccatttgcatcattaactaatttaaaattatctacatcaatcataaataaggctccatagttacctggttcaactaactgaatctctgatgtaattacccgttccaattcacgacgattaattaatccggttaaagcatcagtccgcgcctgccgtgtcaattcaatcgtcttacgtttatcatcatcaatatcgttagcataaaaaaagcccatcaactgattagtttcttcattatataaaaacatcatatgcgtagatacccaaccataacgctttttcgttggacgataaaataaaaaactaattctcagatcatctttaccatcatggtaagcttgacgtacattatccaatccaaaagtatctaaaaataagtgtttatcttcatcagcaactaatgtaaccatctttttaataaattcactataacttgctttttcatctaatcctaaaagattataagtaacattgtgtgctttaatcacttcatcagtagttaaattaacttcaagatttgtaattgagcgttgcattaatttttgacgatatttaatttcttgaagataacgtgactcaagtcgcacttgctcatcaatattttggtaaactccaacggctttgatcggctgattgtcatcatcaaaaatattagtgaatttaacatgaatccaaatatatttatcactattaagtgcacgcatttttaatttaacttcccctgtttttacgccaccaataatctgatgataaaaatgataaaaatcatcaaatgaacgttcgtgaatcaaatcactatcaatcaatgattctgggatatttgaaaaagcagctgaatcaaaatacgcttcactactttcacttgaacaagaaacctgtttactacgatgatcatattctaataaaaatacattactttgattaaatgcaatatgatacatttcctcattaattcgcgatttttcttctagcaggcgttctttagaactatcggtaatcaatccaacaaacacatttcggccatcttcagtgccaatatagttcactctaaaatatgtccacatcaatgtcccatcattacgaaaacaacggcagccatgctcaaatgattctctattcttagtagcttcataaaattcttcttgtagaggtgctagatcaggttgataaacaatttcaaaaacatcactatggaaaaccgttttaaaagcttctttactatatccaaataactgataagttccgtcatttgaaaataatgttttaatcttattttcctgcatttcaaaaacaataatcccacctggtaaattattaatgattttatccatagatgctctatttttctgattaaacagtctatcttgatattccatttccagacctccattctttgtaagatacttgaaaattatatcacaataatatcacttcttcaattgtgagattatcgacaaaaagtctgataataaccaaataatttacattattcacctaaaaaaaggaaaccctaaaattatatcttaatacaaaaatttaaaataaaaataaactatcttaagaacagtttattttttctctaataactccgtcgtttcccgtatactctttgctgtaagggtctgagaagttgtaatcatttccttgggggttccctgaaatacaactttgcctccatttttaccaccttcaggaccaatatcaatgatccagtcagcctgtttaattacatcaagattatgttcaattataataactgtattaccgctatcgacaagcgaattaaataatttcatcaatttcgttatatcgcacgggtgcaatcctgtcgtcggctcatctaatatatatattcccttttttattcaaagcttgagctaacttgatcctttggatctcaccaccagataaagctgttaaagactgacctaaggtcatatacgataatcccacatcgactaattgttgaagcttcttagtaattttagcattatcaaagaagtcaagaacctcctcaattgtcattacttttcctaatcccgaacatactgggcaggatcattaaaagaaaaacacgcggcactgccaaaataaggcttaccaatacgagaaaataaaatgcgtaaatcagtatacaaatcactaattgttccagctgttgaacgaatattcccacccaaagaagattgctcgataataaccgctggtgacaaattttcaatactttgaagatttggtttaacatattgtggcaattttccccttataaaagccgcaaaagtttcatttagctgacgacctgactctgtggcaatcgtatcaaaaacaatactagactttcccggccctgataccccagtaaagattacaattttatgtttgggaatatctaaatcaatatttttaagattattttgaatcaaacctctaatttttattttgtccattatattcccctatttaaagaacagataactttaaagttatctgttcttatttaattattcatcaaatagcggttctagatattctttaataaattcaattcgatcattaacatctggtttaaacgtagcagtaatcgatattactatttttttcatgatatttacataaataacatttcccccatcacccattgccataaaaccatcttgatgcagccaccataaatatccatatgctaaattaagttcatcattataactttgtttttttattgaatcaataacccattgctttgaaacaatttgttgcttattccatcgtccttgatttagatataattgcccaattttagccatcgccctagttgataacgtaagtccccatcctgctgcattaatgccacatgaatctatcacccagccgttaatatctttagctttaagaaaagctacttgttcctcctcacttctaaaagtgattttatctttaacttcaattccaagtggtgtaaataaatattcagtagcaaaatcaaatactgatcttcctgtagtattaactaaaatacctgataatatatctggcccaattaatggagcatactgaaattttccaatttcaccacaatcacctagtaaattaagggaaaaagtaacccagtctttacttgtaaaatatttaatataagaatcttcttgatatttgtaaggtacagtcatcgtcatcatatctctaatagtaattttttgaattgccaaattattgttttttattacataattcggaaaaaaatctataatcttttgatcaattttttctatataacctttatctaaagctatcccgattaaaattgaaataatacttttagtaacagaagcaacatgtaccgtactatttacgttacccccattaaaataattttcatattttgttacaccattttttaatccaataattcctgtaatattatcatattttgtattaatgatttcttctaactgcattattttctcttggttcatctagttctcctttattttcatcaaactttaagcttacttactggataataaacttcagtaataagttctttgtcacttgtaacctgtgatggatcatttacatatacttcatacaaaggggcatcatttttataacctattttttccgcccattcacattgtttaatatataccgaagacaaattagaataagagccatgaacaaccgttttaagacatgttcccggtacaaattctctagttctattatttgtttcttgtacaggaatggcaaattctgtatctaacccttgtaaagtaaattctgagctgtggaaaagtaccatcggtggcgcggttactgttaacttatcggtcataatttctctaaacaattgtccaaaactattactgtatgcttcagcaaattcatcttcttgaatcattttacgaatattcagtaaattcataggcggtatttctactagctgcacatcaattttatctagatacgacataattgattttccttgttggagagttgtgatatcctcatgcagctgcgctaaagaattttgataattttggatttttaaatcaatctcctttttctttttcattaaagctttacataatttttcatcctgtgcttcttctgtttcaagaatttctttaatttcttctagtgaaaaattatatgattttaagcgattaataaataacattgtttctaactgatcaatagaataatatcgataaccattttccagattgatctcatcgggtaaaattagcccaatttcagcataatatcgtaatgttttagtcgaaacttggcatatctttgaaaactccccaattgataacataaattagtacctcctactaatctctatgttcatcttacaccttgccctaaggggaaagtcaatgtaatctaattaagttttttataatccacaaaaaagaggaccttagtcctcaaataaacatgctccattagtttcaattacctttttataccaataaaaactttttttaggaattcgtttgtatgttcccttaccgtaatcatcagcatctacataaataaagccatatcttttactcatttgctttgtcgattctgaaacaatatcaatacatccccaagaagtatatcctaaacattcgactccatcaatttcaatagcattaagcatttctttaaaatgacaatcgaaataatcaatccgatattggtcatcaatagttccatcaggtaaaactacatcctttgcacccaaaccattttctacaataaataacggtttacgataacggtcatataaatcaaccattgaaattcttaaaccaattggatcaatttgccagccccattcacttgaaggcaagtaaggatttttaactgctgtgacagtatttccaactgctgtatctaaaccttcgctactagcagctgaacatgatgacatatagtaactaaatgatacaaaatcaacaggatactttttcatcacttcatcatcaccaggttcttttacaatttctactccctcatttttaaattttgctaataaataagcaggatattcaccaaatacttgagtatcactataacaatatgtacctctcatatcttgttgggcttgtaagacatcttctggtttgcaactataagggtagtatgtcagtttagtcaacatacaccctaccattgaatcagaaataatttcatgacaaatttttgttgctaacgcactagctacaaattgatggtgcattgcttgaaaaattacctgattccatttaattcctggaaaacgatcttcaatcaaaccaccagtagtataaggatgacgaatcatactatccacttcattaaaagtaagccaatatttaactttatttttataacgttcacaaattgtttttacgaacgtttcaaagaatccaactaatttacgattataccagccattatattttaatactaaatttaatgggggttcataatgtgacattgttacaagtggttcaattccatactttgcacactcatcaaatacatcatcataaaattttaagcccgcttcatttggttgttcatcatcaccattagggaaaattcgcgaccaggcaatcgacatccggtaaactttaaaccccatttctgcaaacattttaatatcttctttataatgataataaaactgactcccatgccgttttggatacaaactatcgtcatcacttgctaatgcttcttcaatatctttactagtaatatgattatgagctttataattttcaacatcaacatcaaggtgatgacgggcacaatcagaaaccgaaataccttttccaccttctttccagccaccttctacttgattagctgcagttgcaccgccccataaaaaaccttctggaaattttctcatcataactcctcctatataattttattataagtttttaatcagcagttgcccatatcgatatattgtttcggttagaattatcaaatattataatttgttttaagcttttttgaaattatcaaccattagtcattttgccaatcatagcgctgcccaatcaattcttcaagatgccgttctattttatcgtaattatgaacaattaaagatgctactaagatatctaaaatatatagtgatgacatagtaaaaattactgttgaaaattcaaaggtattttctgttatcataatttgaaaattataatctgttagattcaataaccgcttatcaacattcccggttattgataaactagggatattatattgttttaaacgtttcgcagcatcaaccatactcggatttttaccagtatgtgataataagattgaaaatgaaggaattttatcttgctgcaatcttttacagtgattccactggatactgttataagcatttgctgaaattccgatttcgtcaagtttgtaacaaatattacgagcaatttcaaaattgattccatcaccgtataaatcaattacttgtgctcgcttcattaagttgcttacgcgaataaccgtattacgatcgagcatgctgcgagtatgatcaatagcacgtgaataaattaacggcatagtatgaataatatcgtcaattccactatttcgactgaatggtactacttttaatgaatcctttaatttcatcatttcaggatattctgatacataaataaatttcatatcagcatatcctttagtacctaattttttacataatcttgtaattgtcgatgcactagtataacttgcattagctaactcattaacactcatttccaataaagctttaggattagcaataatgtagtcgacaactgctttttcttgattagtaagattttctagggtattcattttatcaataatcatctctctatcctcgcgtatcttatttttcttcattataatatttttattgacgaagcaacatttttttcattttctaaaaattactaattaaaaatccccagttttaactggagatttaaaaaattaattgaattagatagcaaacatagagcacacaagtcaaagtttgcccaattttttctgtgatatcaaaagtagaatcctttttccaaacacgatacatcgcaataggtggaaataaaataactaaaaaatatgtgatgattttatatttagtgaaaggatgtaatgctttttcatctggtttattgagctcctctttcatccttaaaatattttgttgtcgtagagtcaatccccgattgttctgtttgattacttttgttgccatctctattctccttgattaattttcttgcttatttgcagcaaaaacaaatggtaaataaacgataaatgataatactacacaaagggcttgagtaataactgccccaatacttcctcccgaacctaaccaggcaattagtaatggtggagtagtccacggaactgcataaatcatttttccacagaaaccaattactgtcataaaatatgcaaatgttgcggtaatgacaggtgttaaaataaatggaatcataaaaattggatttaatacaattggcaatccaaaagtcattgtttcattaatattaaatagcccaggggctaaagatagtttagcaattgttcgatggtcggaacgttttgatgccagcagcatagcaaataatagtccaatcgtacagcctgctccacccattgttgtaaaacaactaataaatgtttcatttaaaataaattgtggggtttgaccattagctgcagcatcagtatttgcgataacagcttctaacatggttgcttgataaaccggttttaatacttgagtaccatggataccaataacccagaaacaagttgaaaggaagaatattaataaatatcccggtaatcctgtcaaaatacctcttaacggcgcttgaatccatgttgaaatcatattgtaaattgaattccctgttacttttgtaaataaaagtccaaaggccgaaataatcaaaattgtaagtactgccggaaataatgcattaaatgctgatgaaacatttgatggcactgattcgggcattttaattgctaattttccactatctgctaagcgacaatatatttccattgaaacaatagctacgatcattcctaaaaataatccttgtgcattagtaaactcacgcggcaatacattgactacttcaactaaatcagttactccctcaactgcaactttagtaaacgaatcgcacaaagatacatatgcagaaattgcaacaactggtgccactgtctctttatgtcctaattgtttagccatttcaattgctattaacactactgtaccaatcgtaaagaaatttaaagtagcgtaattagctgcggtaaataatggtgtcaattcttcaagccaagcaaatccatcaattttagctaagctgattcctgtagtagttgtactacacacaacattactaaacagcgtacaaaatgctcccgtaataataattggcagcaaagcagtaaatgcatttttaatcgctgtcatatgacgttgattagaaatttttgaagcgacctttaatagcccctcggtaagacgatcagtcatactcataactctttctccttttatcaattaaaattttattgtgcacaaaatttaatttatagaatgattgtaaccgctaacaaattttagttctaccgtagaaaattgctttggttgaaaaacgtcaagatattcaatatttagttttactttttgaaaatttcgttcaaaatttaataaataaaaactattaaaactttctctctaacagccaactcaatctaaatttatttactatccttcacaattacctgttttaaaatatcttattctaagccgattacttttcctaatttgagtccaatcctcataccttcagttatacctctttgaatccattatcatgatgcctatctttaattgtaatcattttttataaacaacttgaatcataaaataataaaaagagaacttagtcctctagtatagatgccccatttgtcgcaataacttgtttataccagtcaaacgaatcttttttataacgtttatatgaaccattaccataatcatccacatcaacatacacaaaaccataacgtttagacatttggtttgttgaattagataccaaatcaatacatccccatgtggtataacccattagctcaacaccatcttcatgaatggcttcatacattgcttgacaatgttgttttaaataatcaattcgataatcatcatgtaccttgccatcaatcaattcatctttagcccctaagccattttctacaataaataacggtttacgataacgatcgtatagatcaactaatgatactcttaaaccaattggatcaatttgccaaccccaatcagaactaggaatatgaggatttttaattgcagttacagtattacctgcagttttatttaatccagtatcatctttagccacacagctagatgaataataactaaatgaaataaaatcaactggatattctttcataattcttaaatcttcttctgtcatattaatattgaagcccttatttttatacatacttaataaatatgctggatactcaccatgaacttgggtatcagagaaacagtaaattgagcgcattctttgttgtgcttctaaaacatcttcaggtttgcatgtatatggataatacgttaatttagtcaacatacaccccacttttgcatcaggaatattatcatgagtgaccttagtcgctaaagcactagcaacaaattgatggtgcatagcctgaaaacatacttcttcaaattcttccggtttaaatcttgattcaatcaaaccaccagtcataaatggatgtctaataattgaatctatctcattaaatgtaagccaatatttaactttatttttataacgtttagttattacatcaacatatctaacaaaaaaatctattgctcgacgatcataccagccattatactttcttgcaaactctagtggtggttcatagtgtgacattgttactaatggttcaattccatactttgcacactcgtcaaatatgtcatcatagaattttaatcccgcttcattaggtactaattcatcaccattgggaaatatccgactccaggcaattgacaaacgataaaccttaaatcccatttcccctaataatttaatatcttctttccagtgatgataaaaatcactagcatgtcgttttggataataaacttcatcatccgttgctaatgcctgatcaatcatttcatcagtaatatcacataatccatgtacatcagttaactcttttaaacttttaggatccgtaaataatgccacgtcacttaccgaaataccttttccaccttctttccaaccaccttcaaattgattagcagcagtggcaccaccccataaaaatccttcaggaaattgttttgtcattttatcgacctccgtattctaatttattttaatgttagcactattgattattaatttcttatttgtttcatcttatgaaaaacaaaagcagtagatttttctaccactttcgttaatcaatataattatttaataatctgccatcagcaaaattaagctccggataatgagcttttaaattttctacaacattactgataccgctacctccagatgtagcgaaaggtacaatttgttttttagaaaaattataactttccaaaaaggtatcaataattcgaggttcaacataccaccagattggaaaacctagatagattatctcatattgatcaagattatccaatttgtttaaaatctctggtctacagctttgcgccttcatttctaaagaactgcgactattatcatccatccaatttaaatcagcacttgtatactcgatctttggacaaatttcaaataattccgctaattcttcttgagccagtctaagtgcgactttttttgtaacaccactagcactaaaatacgcaactaatttcttactcatacatttcctcctaaacaataataaaggtatatctctatacctttattataagatgactttaaataaagtctaatacttagtttttattagtagtaatgcttattaagcatctatgctgtttgttcaatttgtgcctgttgtttttcatatagcttaacaaaaggtaaatagatcaatgcagataaaatgattcctgctaattgacaaattggcgccataaaattacccccagatcctaaaaatgcaattaacaacggtggcattgtccacggtaaatcgacatacataattggacaaatatgaagcattgtaagaacataaccaaaaataacagtaactagcggtgctaaaataaatgggatgattaaagttggattcattacaataggaaccccaaacatactaacttcaccaatattaaataattcaggtactaaagcaattcgtgcaattgatttattttctggacgtttacaaactattaacatagctatcgtcaaacctaacatacatcctgttccaccagtagcgaagaaagcccgatgaaatgtattattgacaatattacttggctccaaccctgctttaattgcatcaagattttcaacagctaaagttgttaaaataggattgaaaacaccaccaatcatgttatcaccatgtaatccaattgaccaaaatactaaactaataaacataaatgttagtacacccggtaaagaaccacctatatatagtaatggcttttgaataacattaaaaataacatcattaatgtagactcccgataccgcatttacccccaaaccaactaaagaaataatcaaaatttcaataaatgcaggtactaaatattcaaatgatttagcaatttgtggtggtacttgatctggtaatttgatttttaacttatcaagtttaaataatccacaaaataattctactgccactatcgctacgatcattcctgtaaatagtccttgactccctaatgaactagtaaagattccactcacagtttgaattaattcacctcccgctttaatatctaatgatgtttgagttacagttaataatgaaacgactgctaataaaccacaaaacattggactgctttttcgacttgttccaatttcaccaccaactaaaaatgtgattgcaacactgatacatccaattgtcgcaaaatttagtgcattaaaagctggatttaaaaaacttaaattcattaccgctggtactaaggcccctaatcccgtggtatcattacaaataacatttgaccataatacaccaattgctccaataatagtaaatggaacaaaagtctgaaatgcattcttgattgatgaaagataacgattttcagcagcaaaaacgcctactttcatcaatatatcttgaaatttatccataaaattcttctcctcttttaaaaacattgtacttaatcttcgctagcagataattaagttttttcaagccatattcatcttagcaaaaaaataatcataaataataaattgtctagatacaggaataaaagttcaattatttagatttatcagtaaaatatttcgtacttttagtcctatttaagttttcaaatctttagtaaataattagatactcaattagttttacacaaattgtaatgtactattaaaatcgtataaaataaaaaagattactcgactgagtaatctttacaacctaaaaacaaataaattattattttaactttgaaatacctgtttccaatatttccatttgtaataatgtttgttcatgagtaataatctgaggctgatgcttaacaatacaatcatagataccatcatacactcgggcatagtcccctattacactaaccactttttcttcgtgataaaaaccatcttgatcataatagataagggtaccataatgctccggtgtatcaactccaaaatctttattcgtcggcatataaaataattttaaatgttcttcttgacgatccttgctctgtttaataaacattcccttcttaccatatacaacaaaactaggtctttctttaactctaaaataacttgatttaacagacactttcaacgttccataatacatatctagatcaaaataatcattaaaacgcccctctcctaataattgacgaacatcataattaattgtatcaggttttccaaaataactaataacctgatctaatgtatggcaaccatgcccatataaatatgacattgcaggatcaaaatgattgattttttctggaacctccggacgataataatcaaaatgcatttctaattctaataaatctcctaatttcccactctctattactttttgtaccgttaaaaaatcactgtcatagcgcctattttgatatgctgagcaatacagccctttctcatcagcaagagcaaaaatctctttagcctgtgcactattttccatgaatggtttctcaactaaacaatgctttccagcatttaagaccatttttgcataatcatagtgtaagtgatgagctgtacaaataacgaccatatctattttaggatcattcaatatcttattaacatcctcaacatactcaactccatcaatagttttccataaatcatgtctaatcctaatatcaaatatctttttaacaataaacttatctgatctttgtaagacaaaaggtaaatggtaacgattagcacttttgccattcccaatataagctaaaactaatttattattaatcattttcagatactactcctttctattattcataatatttatattttatttttctcatcatgatattttgataaaacatcaacaattatttggtgatcctcattatgagctaatccagatacaataacacttccaatcatccctttaccaacaataataggataagcaccaccacatatcacatatctttcatcattagtgtattgctgataacaatgacttcgttcattctcttgccaaatttgataagttggcaatttaaatagttctactgtgttttgtttacgatttaaccattgatcaccttttttgccattcatcaaatattgaaaaacaatatcttgatttaaaacaattctgattctaatattttttaagttttctttttttactttttcaactaaattacaaccaagcaaaaaagcatcttcattatcaaacttattaaaagcaattagtttttccattttatcaccccatttatttatatcataaatatttagaggttttgtttattccccttatttagtatctaaagttctattttaaaaccataaataacaatttataagtacctttagacctaaataaaaaggagtttaattaaactcccactaaattattaaatttctttttcttagtaacaaaatatgcaattataattgatgaagctgttaaagcccagctaattggataaataatcaataacatattatatgtattgaaatgcgggaagactaaaaacatataacctaaccgaaccccgcaagtaaaaataacacataataatgttgaaatcataggactgcctaacccccttagactacctgacataatttctattgtcatatttaaaacttcaaaaattaatatatatgtcattctgattgtcgccaactcgacaattttaggatttgaggtaaatatacctgcaaagaaccgatcaaaaacaataaatatcatacttaatgagactgtaaaaatagtccctaagatcatacagcctcgagtagatttgatacatcttttatagttgcctgctccataattttgactattgaatgtaatactagcttgtgaaaatccagttattaaatagtatacataaatttcaaaattcaaaccaactgttgaagccgcaacaacatcagctcctaaactgtttattcctgattgaataataatattagaaacattaaataacatcccttgaatagctgcaggaatcccagtaaataagatatctttagtaatagtcttatctatttttagtttttctaatgataatttcaatggtccctgttctttagttaagatataaaataataataaagcactagttgcatctgcaatcagtgttgctaatgctactcctgcaacatctaatttacaaacaacaacgaaaaatagtcctaaagtaacatttacaacaccagaaatcaataagcagtatagtggtcgttttgtatctccaccggcccttagtattgctgcttcaaaattataaatcgttaaaaaaatcattccaataaacgtaattcgtaaaaacaaagcagcttgatcgagtacttcttttggtgttgacataattttcaatagccagactgcaataacttcaccaattaaagcaatgacaatcccactaataatcgaaagtaatattgaagtatgcactgctttactagtatctttttcattttgagcccctaaaaaccgcgaaataacaacatttgctccgattgataaaccaacaaatattgtaataaataaattagtaatcgggctggtactcccaaccgctgccaaagcattacttcctgaaaaatgtcctacaacagcaacatctgcagaattaaataactgctgcaacacacttgttgctgccaacggtaatgcaaatgccagtattttgtcccaaatacttccgttcaaaatatcaattctctttttttccataataaatcccccaattttctcacttattataaatcttctactatactttaaggcaagggattttcaaaaactgaaaagaagcttattttccaagttttactttatctaaaaataaaacgtagcacttattcaactacgttttatgaatacttcattatatacaattttaataacagtaaatagttaatatatctgtaatatcaaaattaaaaaggtattgatcaaaactaatcaatacccatattatttattcactttttaattctcgtccattcatcatattacgacatccatataaaatcaaaaacgatattgcaaagtttacaaatagtgcaacatagctagctgccatcatcgccacggtagtgccgctattcaacaagatggcagtagtgattacagcacttggaatcgcaccaatcaacatcactatcattcgcataaaattctccatcattggtgaagttcgactctttaaaagtctaacagatagtacacttccactaataaagatactagtataaccaataacatttaatagatagacaatgatcatcattagactttgatgataatataggcccattgcaataaaagaaacagctgcaacaacaaatatctttataaatgttggaatgattaccgcaatcaatttactaaacggcttatcaggaattaaataaatttgataattttttaattctttagataaatctgaattttgtaaagaagaaaaaatccaaattaccatcatataaataaacattccaaacccaacgtcaactgctattgttactgcaatatatattccaattgaaatcaaatcactaacactaataaaactattagttttacgcattaataaaatattttttgacattacagcataagccccttggcgaaactcccccttaatcccaagctttactttcttatttcttaaagcctcctgatctccggctttggccgctttcattcgttttgataaatctagagaatcttgtaaagcctgttcataaaaattacctcgataaccaataaataaaacatatactaagattacagctccacacaacaaaagatatcctaatgttactaacaaatagttatgctcaacataagcaatcaaagctaacttcatccacccaaaaataggaactacataaaataaatttgattgcacaaaatccataaacaaagtatgataattccccgtttgaagatataaaaccaaaacgataattacaacaaaagcaataataataccaggaatgattttcgaatacttacgatatttcttatccccaattgataaaacataaagataatctgttaataataagaaaaacaaaacagtgataacagatgctaagtaagctagcacaataaaaataaaattaaatccggcaccaccgctaaatgcagctaaaaatactaaactaatcaaagcaagtagaaaggcctgaataattgtttggaaagttaaatagctcattacttgtcttctagtaaaaggacctgtaaaaagatagaatgcatcctcacctgtaaataaagctttttttgactgcatcaatgttgcaaatagcataattgcttgaaaaccaattaataataaaattcccatgtgcaaatctatattattaacagccataatttgacctgcatccacattgaataaactaacgatcattgcaccatagaatagaatcataataataacaaatactccacttgctttacgtttaaataagttcctgattgtccctttgatttttaataaccatagttttaataacggtttcatcttactcaccatccgttaactcaaagaaatattgttttaacgattcatcttctaattcatcacgtaaaacgtgtttaataattttacctttattcataatataagcttcatcataaatatccttaataatatcaatgatatgggtactaacaaaaactgcacaaccttcttcctttagcaacgtaaaaatttttaaaacatcttcaatactagctggatctaatcccaccatcggttcatcgactaataaagcttgtggctggattaaaagtgctaataacatactcagcttctgtgtcatccctttggataactctttagccatgcttttccttttccctgttaatttaaataattcaagatatttattcgcaatctcgtgataattgtctactcgatacgcatttccaataaaatcaatatgctcatcaatagtaagcagatcatacaaaatcggtgtttctggaacatatccaaaacaacgtttagcctcaatactatcattaggataaccacaaattttaatctctccatcaaatttcaaaagattagcaatacttttgatcgttgttgatttaccagccccatttggtccaagtaagattgtgacttttccccctttagcaactaaatcaacattatcaacagctctaaagccatcataaatttttgttaaaccatttacttcaatcatttcaaattccccctagtctatatattcactatactctaacgacctagggcactgtcaaccattcatgcaataattaatactttttaagaaaatggcactaaatagctatactcatcaaataaattattgtgcttaaatataataaacagctattttaaatatcaacaataagaagcttactctacaaattcattatacttttgcttgataatatctgttaaacggacatctggatgatgatatttctctcttctttcaatttctttttctttagacatatatatcgctgctgttggacaccaatgaaaacacgctaaacaggtcatacaattatctttaattttaatttttccttcaatcaactcaatattattcattggacaaacttttatacatgtttggcacccgatacacttctcgtcaactttaattccacgcatattacaagctttatatactgcagaattttcaacttcaggtaataatgaataatctatcttatcttgttctattattgattttacaagttttttgatatttgtcttttgattagctaatgtgtcttttatttgttcaacagtactcaaataactattaccaggcattgggattcccttacttagtgctaaacttaaatttttttcttgtaaaagattatcaaatctttttgctacatctccgggatgtcctctatatgttgtgaatataaaaatataagtattctgcttaaatttcatttttctaatagtatcccttataagatatggcatatccccatagtatattggaaaaacaaaccccactcgctcataatcaacttcgatatcttgtttattgtgaagtgctgcaagcgatataacatcacattgcccatcaagagatgctgctaatagttttgctgttgtcaaactattgccggttgctgaaaaataatagattcctgtcttcatattaaccccctataaatactttactacttttagaattcttaattataagtataaccaaattaactaattttgatagtattctttcaaacacagaaaaagaggggctcatgtttttatgaactcctcacgtgtcatcaaatacttaacttaatgatatcgaagcttaactttcctcaattactcccattaactctaaaatccgatttaaatctttagtatcagtatatttgattgttacagccttttcatcaaccttaatcttagttctaaatttctttcttaataacccttcaacatagacatattcctttggtttttcaactttaggacgatctttacgactattgcctaattcaattcccttaacaatgttttcaacatcacgaactgataagccttcttcaatacaacgagcagctaaactttcggctttttcttgaggaagagtaattaaacaacgagcatgccccattgtaatttttccttcaagtacataattttgaatcatttcaggtaattgtaataatcttaacgtatttgcaatataacttcttgatttaccaattcttttagctaattcatcttgcttaagattcaatctctccatcatcatttggtaggctttagcttcttcaatagaatttaaattctctctttgaatattttccaataatgcaatttccatcatttgttgatctgtaaaatctacaataattgcaggtatttctactaatcccgcaattttagccgcccgacatcttctttcaccagccacaatttcatatccctggattgatttctttaaaatcaccggttgaaaaacaccgtgttctttaatcgaaattgcaagttcttgtagcttttcttcatcaaataatttacgaggctgataaggattaggacgaatttcttctaaagaaactgttatctgttttgattcaggtgtatttttttcaatatcatcaatcaaagtactaatatctccaccaaaaatagcatctaatcctttacctaactttttatttttagttgttgccggcttacgagcagcaggctttttagttgtagttactgttttcttagttgctgtttttttagccgccatctttgctggggcactttttgttgtattatttggcatttcgtttacacacttcctttgcaaaatctcgataagcgcgagctccttcagaattattatcataatcaaaaatagctagtccttcagaaggggcctctgataatttaatatttcttggaatcgctgttttataaactttttctttaaaatatttgcgtacttcctgtgatacttcaacccctaaattggttctttgatcaagcattgttagtaatactccttcaattgttaattgtgggttgaaaacactttgagttaataaaacagtatttaataattgtgtcaatccttctaatgcataatactcacactgaactggtattaaaaccgaattacacgcagtaagtgcatttgtatttaataaacctaatgctggtggacaatcaataataatataatcgtatctatcctttattttatcaagcgctttttttaagcgttgttcacgacctttttttacgttcgctaattcaagatccgcccctgctagatcaatactacctggtgctacatctaatttagcaatatatgaaggaacgataacatcattaatattacactcttcaacaattatattgtatgttgataattcaatatgatcgcggtcaattccaatcccttgagttgcgttagcctgtggatccatgtccacaagaagaacccgatttttagcatttgctagagcggccgctaaattaatactcgtcgtagtcttaccaacgccacctttttggtttgtaatcgcaattatctttgtcattatttagcctccctcattaatatttcttcccaatagtttcacctagtttaactacggtctctttatcattcatactattttcaattatatcgttatcaataacaacttgattttcttttaataaaataattactgttgaaccgccaaattcaaagtaacctttttcttcacctttaaaacattgtttcttatcatggttaacgattctaccaaccatcatcgcaccaacttccatttgaatcattttaccaaaatttttagattcaattatcgtatagctgcgactattctgcttataaatcggataataatcattagcaataggattaactgtatgaaatctacctttaatatatttatttcctataattttcccatcatcaataaaactataacgatgataatcatctactgtcaatctaaaaatcatccaataaccattcatatattccttagctaactcatcgtcttctaataattcccccaatgaataccttgtatctttaatcataaaacggctatcttgatcaattttataacatgataacttagaatcagctgggctaatcaaaacattatcatcagctaaaaaagggcgttttccatcaactattttacgagtaaaaaagtcattataactcttaaactctctttgttcatactgcgacatatctattttattttctttaataaacggtgcaattcttcgttttgataaactagaattcatataccagccacctaaatcactaacaaacttgcatacaaggatttttaaagcacatctaccaagaaatgtgccataaagtttctttaataagttattttggccctcaccgttagtttgaacattccctaaacgatcaacgactatcattttgtcaccacgatttgaatcaactctacaataactaatacccctaaagccgctaagccttttgactgtactttaggaactttaaaatcaacaataaataaaatccctgtaatcaacatcaaagcaccataaagataatccaactgaaaaataacatatcgcaaagcatatgccatcggcaaaataaatgatgatgttgtcactggcaagccttgataatactttctcttttctgttgtttctttttgtcttgtctcttctttaacattaaaatatgcaagtctaataaccgcagctagaacataaaatatctctattgctagccatccaattgaacttaatccaacattataccctaaaatagccggaaaaactccaaacgccactaaatcacataaagaatctatctggattccaaaacgcttttcttcatctgtacgatttttcttactacgtgctaccataccatcaaaagtatcacaaataccacacataattaagcaaataaatgcccattgatacatcccattaaaagataaatgaatccctgccattgcaaatatcaatgacaaatatgtaagaataaccgtataactataataaccgatcatttttctactccctaataaaattttcaacaaaaacagtatagcacatatttaactaataaggtacattaatctatcttttgtctcttaataaatctaaatttatttgattaattgatataaaataaagcaattgagcagttcgctaattaaacatattttttaattattctaaccaatttttaattgccctatcaatcttgcacctcttaatatttagttacttctatgcattatatcaaaattttctttttaaacaatctttattattatgagttataatttttatactatagatttagtctcatttccaaacttttcctatatatttatgaagtgattttatttatattattataaaagaaaaaataggtaaactgatgaatgatatgctcccttctaagtagacaagtaaattaatgacttgtcacctaggagggagcagttcagaacaactctttacctgctttttatctagatgtgtttatttagttttagttaaaatcaatatttagtgtttggcctaacataacatccttattaatatccgaatttaagcgagcatccggtttatttaaaaagattactgaggtagttgaatcgtaatgtttactaatttcatttaaatcaaatgctagcaggacatcacctttattaacttttgcgccttgttttaccattgcttcaaaatacttcccccctaattccacagtatcaatacctacatgaattaaaagctctactcctgattccgatgtgattccgattgcatgattagttggaaatactgcgtttactgtaccattaaacggtgcaataacttttccttctgccggaataattgcaaacccctttcccattacttcctttgaaaaagtttcatcattaacatcacttagtgaaattaattttcctgctattggagaaattataccatttgtttcaacaatctcgtctttttcagttttcacaagaagcattgcaataacaaaagacgatataatactaatcaagaaagcaataattacatttgtaacatttacctgtaaataaattggtaaactaacaatactactagaagcaaatgctggcagttcaaaaccggtcatcgaaataaatgcaccacccagtgctccacctaaacaagctgatattaatgcttttctattgtggataagaactgtatataaagctggttctgtgattcctaagatagctgatatacttgcagaagttctaattgttcttttttctttatttcttgttttaaaaatcattgcggcaactgcaccaaattgacccattgtagacatcatcattgtaggaagcaagaaatctcctccgcgttctgccaaattttgaaaaataacaggggtaaatgcctgatgcatacctgtaattactaacaatggtctaatgaatgataagataaatcccccaataaagcgattaaatgtaaatagtcctcccacacaatatgaaataagtacaccaacatagttacctagaggccctaacacaaccagcattaatggaaccataattaaaagtgaaattgttggagtaaaaattacttttagtgcatttggcattattttatctacataacgatatatataagataaaatccatactgacaaaattaccggtacaactgaactagcataattaatcaaaggtactggtaaaccaaagaatgataatgatgcttctgtatcagcaacaagagttgtaaaagtcggatgaatgagagtagctgctaatacaattgaaatcattcgattcgtattaaaaatctttgatgctgatgctgccaacaagattggtaagaaataaaatgcaacatctgccatcatattaaatacgataaagacaccattatcttgaggaataatctcaaatgctttaattaatgcaatgattgctttcaacataccagcactagcaattgcaggaataactggcacaaatacacttgataatatatttaaaaagcttttgacaattccttgtttctctttttcttctaaattatctgcttcagaaaaattgaaatctttttcaatcgtctgataaatttcacttacctgtggtccaattactacctgtaattgttcatttttaaactgcacttttaatacatcttttaaagcctctagtttttcaatttctactttagtattatcttttaaattcatgcgtaagcgagtcatacagtgcatgatattttttacattatctttaccacctacatacgcaatgatttgttttcctaattctgtataagtcatgatcattccccctgattattttcttttaaaatatttccatttgatttaataaactctttcatccagtaaaatgatgctttgggatatctctttttagagccatttcctttatcgtccatatccacatagacccagccataacgttttttcatctcaccagtgcttagtgatactagatcgatgcctccccacatggtatatcctaaaactggtaccctatcaatttctaccgccttttttatttctaagaaatggtcatttagataattgattctatatgtatcgtttacaaaattattttcatccggtttatcgacttcgcccaaaccattttcgacaataaaaattggtttttgataacgatcatacacttcatttaacacatatcgtatactaactggatcaataggccatccccagggtgtagattttaaatatggattttcaccgaatggtaatgcgatgattcctaatttatcgtctttcccaatcgttgttgatctataacagctaaatgaataaaagtctaaggttccttcttttaagatttcttcatcattttcttccattcttatagtcaccttatattcatcccagaaacttcgtgcaaagcttggataataacctctaagcattacatctgaaaaatagaatagtcttctcctttgtttcatccatgcaagttgatcatcaggatgacacgttttaggatacgatggactagttgcatacattgctcctaacattgcttttggcataattttttttgctaaaattttagccctggcactggcgataaacaaatgatgaattgcctgccaagtagtttgagcatctgaatttcttgtacccagatgcgagaatccttgaagtacattaagttcattaaacgtaagccagtatttgacttttcctttaaacctttcaaataacgcattacataacttttcatacaaatcaatcattattcgattagaccagccatcatatttattagcaagatataaaggaagctcatcatggcaaattgtaatcattggttcaatattgtattttaaacattcatcaatgacatcttcataaaactgtaaaccttcttcattcggagttttttcctcaccagtaggataaattcttgtccagcagattccaaatctcatcattgataatcccatttctgctaataacttaatatcctctttatagtgatgataaaaatcaaccgcattatgactaggataataaacatgatcgtgaatacaccctactgcaccttctggaaatgattctctatatgcaactgaacctaacgttccatccggcaatctgtatgtaagccttctaggggttgtgtacgaaccatcagtcacaatgtcatgtgtaatgagtcctctttttccttcattaaatccaccttcatattgaaagtctgcactggcacttccccaatacattttaaatggataattcatattttgtcctcctgtacctgtcttatcacactgttagtataataaaaaaaatcacttaatctgtgatttttcacaagctggcacactgtttcaaaacatgaaacaaaagcttacctttaataactatttgtcatttattaaaaaagagataagaatatgttgatcaagtccttagctattgagcgcttgatcgtcatactattatatcctcactctcttttaaaagacttatattttcttagactattccactaattctcatatgaacaggaaaataaaatcaaggcttttaagccttggattttgttatttatgaaacacatttaactactcttgcttaaatctcttactttatcatcaataataattatcagtatattttttatgataaataagcgaaataagattagaatacatctctaatataacggacgatgaataactaaattcttcagataattcaatatatttatgaacaaaaggaaaatgttttaacttatttgcagttatcatatatattttaggaccattttctctatccataacactcaaacgatccagcactctttctaaaaatcttcccccggcactaaaaataataatcagattttgatcatctaaagtctccagcatttctctttgttcatttggatcctgtgttgaataaatgaatttatgtaaaatcgttaaataatattgaagggaaatagccggaaaactagattgaacatgtcccattaaaactactctcttatagtcatgaatatctttaactaactcttcgagagtgtccgtatccatattttgatttaaataattaattatttctttagaacgttcgaaatagttcacaacataatctttggttgtaacaccatcaatatgagaaaatctttctgcaataaatgagttatatgttgcaatcgcatattgaagctccataaaatcctcatacccgattttacgacagaagcggctaattgaagactttgatacattacaattatcagctaattctttagtagtaattacctttcgcctatcaagattttctaaaatatactgtgcgataataaaattcattgaatctgatgattctctattgattacatttaataattgaatccttatattactcataaaatatcccttaacctttccttatattataagatatcttgattctaattactagaaagaaaaatttgagtttcattttttcttgaaatcatctatttaaatatctcgtagatatgtcttcaacacttaaaaatattacttatgtaaaaaaggtatgatatggtcatacctctttatcatttttataataacggctatcttgatataaaataacctcatcattagctaatgatttttttacatctattaatcgttgatttgaggatccacggaatcttaatttacgatccttcaatgcttcaacaaacggtccatcaattaaaacatctaaatatgataaaatctcaacatcaaaatctttgatttcttcatataagaaagaagaatataaccagattgtcttattaggacattgttccttaagatgttttaataaaatggaaacatcctggcgattttccaactctaatggttcaccaccaagaatcgtgattcctacgatatgcggctgatttactaatttaattaaaatattttcagtttttaaatcaaatttattcccgccagtaaaatcccaagtttcgggattaaaacagtttggacaatgtcgtttacaaccttgaacatataaagataccctaattccttctccgttagcaatatccgtttttcgaatttgagcatatctcatcgttactcaccataaagatgattatctaagtgaacaaaacgttcagcaatttcttgtgttctaccttgattccagaaattatcacctaaataaccacaagtacgacgacaaacatttaaagttttatgattacgatttccacaatttggacaataccattcccgattttcatctagtaagatttcgccgtcaaatccgcattcctgacaataatctgattttgtattaatctctgcatattgaattgtgttatacatatagtcaatcaacgctgataaagcatctaaattttctgacatattagtgacttcaacataactgattgctccgccagaagatactttttggaattttgcttcaacttgcagtttatcaaaagcatcaatatgttctttaacattaacatggtatgaatttgttaaataatccttatcagtaattccttcaacaattccaaaacgtttctttaatgctctagcgaatgtatatgtagttgattctgctggagttccatataaaccaaaacctaatcctgtttcttctttccagctgtcacaagcacttcttaaacgttccatgatctttgttgctaactcatttccttctttagaagtatgagtttgaccaattaaagctacaacacattcatataaaccaatataccctaaggaaatcgttgaatacccattttccaaaagcttatcaattggttcccctgactctaaacgagctaaagctccataacgccaatgaatcgggctaacatctgctagtgttccttttaaactttcatgacgtaacatcaaggcctctttacataattctaaacgttcatctaagattttccaaaagttatctaatttatgattagctgacagaccagcatcagcaagattcaatgtcactactccttgattaaaacgaccataccacttgtattcaccattttcatctttccatggtgataagaaactacggcatcccatgcaagggaatacttgtccctcatagttttcacgcatgatcttagcagaaataaaatctggcatcattctctttgagacacatttaactgctaaatccgttaaataacgatacttactatcttgcggtacattattatcatcaagaacatataaaagttttgggaaagctggtgtcacataagccccaacaggatttttcattccaataaatcgttgttttaatgtttcttcaattagcattgctgtttcttcaatatattcaggttcttctcttaaatacataaacactgataaaaatggtgcttgtccattagtagttgagaaagtattaatttgatattgaatcgtttgaattccggctttaatttcatcttgtaggcgtgatttagcaatcttaataatttgttcttcactatagtcaattccaatcaaacgaccttcattacgaacatttcgttggtgcttctcataacttaaacgcacatatggtgataaatgagctaatgagatagtttgtccaccatattgaccattagctacttgttgtacgatttgagttgccacagtacaagctgtttgtaatgatttaggtgtttcaatcaacttatcattaataactgttcctttagcaaacatatcctttaaattgacaagatcgcaattatgcattttttggatatagtaatccatatcatggaaatgaatgattccatcatcatgtgcctgaacaattttaggtggtaataatagccgccgacaataatcttttgaaaattcaccagcaatcaaatctctttgagttgctaaaactgtagcatctttatttgaattttcttccattgcttctttattagtttggtttacaattccatatatctctttgtcaatcgtatttgtttctctttgaaactcccgaactttacgatatccttcatatgctttagcagttaagatttgtcctttttcaattaatttttcaaaaacttgtccctcaattcgatatatcgaaatattattatcactgaattgatgccagttttctatctctacagcaatatcatgagcacatttagaatcaacgatcccgcttccgcactgcattgcttttaaaattgctttttcaatttttgaagcatcaaactcaacgctttgcccatctcttttaataactttcattctgttccctcctaaaaatctcttttattatgttaacactaaaactttttttataaaaataatacgcatcatcacctcattaaaatattcaattggcaatgcacacaaatattaattataactgatatttatattaatttctctagtttttttcaattttagaaaattagtaaattatctattttgatacatctaatactatcatcatctaacaaaaataattgctattttcctaaaatatcaacaaaaaatatttgtttactactaatagagcattttacttttcaagtcgataattctctaatatactaatttacgaaacttattatggaggacaaaagaatgtacgtaatcaagaaagataatactaaagagctttttaatatacaaaaagttgtaacagcaatcaataaatctgcgacacgctgtttatataaattcaaagaaggtgaagaagcacaaatttgtgattttgttgaagcccgagttaaagatttcaatagcaatgaaattactatctctcaaatgcacaatgttgttgaaggtgctttagatgcaatcaaccctaaagtagcaaaaagctatcgtgattaccggaactacaaacaagacttcgtggcaatgttagatgaggtctataaaaaatcacaatcaatcatgtatattggagataaagaaaacagtaatactgatagtgctttagtatcgaccaaacgaagtttgatttttaatgaattaaataaagagttatataaaaaattcttccttacgactgaagaactacaagctattcgtgatggttatatctatattcatgatatgtctgcccgccgtgatacaatgaactgctgcctttttgatgttaaaagcgttcttgaaggtggatttgaaatgggaaatctttggtataatgaacctaaaactctagacgtagctttcgatgtaattggtgatattactttatcagcagctagtcaacaatatggtggttttactgttcctagcgttgatttattattagaaccatatgccatcaagacttttgatttattttatgaaaaatatctaagtttaggattagatccagaaactgcttcaaaagtagctgagggtgatgttttaaatgaatttagacaagggttccaaggatgggaatataaatttaattcagtttcatccagccgaggtgactacccttttattacaatgacgacaggaacaggaactggcaaatttgcgaaaatggcttcaattgaaatgcttcatgttcgtcgacgtggacaaggaaaaaaaggaaataaaaaaccggttttatttcctaagattgttttcttatatgatgaagaactccatggcgagggtaaagaacttgaagaattatttgaagcagcagtattatgttcaagcaaaacaatgtatcctgactggctcagcttatcaggtgaaggatatgtagcttcaatctacaaaaaatatggagaaatcatctctccaatgggatgccgggcctttttatcaccttggtatcgtcgaggaggaatgcatcctgctgatgaaaatgatactcccgtatttgtaggacgctttaatattggagcgatcagtctccacttgcctcttatttatgctaaagcaaaacaagaaagtaaacctttctttgatgtattagattattatttaaacttaattagaaagttacatttacgaacatatgattatcttggtgagatgaaagcctctgttaatcctcttgcttattgtgaaggaggcttctatggtgggcatcttggtctacatgataaaatcaaacctattttaaaatctgctactgcttcttttggaataactgctttaaatgaattagaacaattagcacataaaaaatcattagttgaagatggttcatttgctttaaaaacaatggaacatattaatcaaatggttgaaaaattcaaagaggaagatggtcgtttatatgctatttatgggaccccagcagaaaacctctgtggtcttcaagtgcaacaattccgaaaaaaacatggtgtaattgaaaacgttagtgaccgtgattatgtcagcaactctttccattgtcatgtttctgaagaaattagtcctattgaaaaacaagataaagaaaaacgtttttgggacttatgtaatggcggtaagattcaatatgtcaaatatccaatcgattacaacatgcaagcttttaaaaccttacttaaacgtgcaatgagattaggcttttatgaaggtgtaaatctatcattatcctattgcgatgattgtggccatgaagaattaaatatggatgtttgcccaaaatgtggaagtaaaaacttaacaaagatagatcggatgaacggttatttatcatattcacgagttaaaggggatacgcgtttaaatgatgcaaaaatggcagaaattgcagatcggaaatcaatgtaatgaattatcataatataacaaaagatgatatgttaaatggtgaagggctccgagtagttctttggctttcaggatgtacccatcgatgtccgggatgtcacaaccctcaaacatgggatgtcactagcggtattccttttgatgctgaagctaaagctgaaatctttacagaacttgataaagattacatttctggaattactttcagtggtggtgatccgctccacccttcctcaattaatgaagttggtcaattgattaaagaaattaaagaacgttatcctgataaaacaatttggctatataccggtttccaatttgatgatattaaaacgattgattttatcaaaaatattgatgtaatcgttgatgggcgctttgaaattacccaattagatcctcaattacattggaaaggttctgcaaatcaacgtgtaattgcagtaggcccaacgcttgcttttaatacaattattcttcatgacgataactaggatggccatagccaccctagtttttatatataatacaaatcctgacctaatgcttttaatgcactttcatccgtaatcaagtaattgcctcgtttaaccttacaaagatacccacactgacaaaagtcatttaagactcgctgtaactgacgataactgcacccgatcatttctgctacttgaacaaaattatccttgatgatcaattgttgagcactcgaaataagatatgaagctaaacgattttcaactggataattaattgaaatagcagtattatgattagcatgatatagccgatttgaaagtgttcgtgctaaataacgcataaatattaaatcatgtaataaaatatcttcatattgcgctactgatattctaaaacaaactgtatttttgagtgcgtaaacatcattagtgacttcatgatgatttagaaattcaacttctccagtaactgtgattggattagaaaaagctgataaaactgttgttccattcgcagtcgttcgacagcttttaattcttccagatacaagaatatataaatattctaatatctgcccttgatgtaatagatgttcagccttagaaaactcacataattcaagatactgataattatcatcactcatcatctgctcaactttaagcaaattgatataatactctcgatttttcatatatatcaccaccttaaatatgacatatgtcgtatttaaaagcaatatcttttctttataataaatttggaggtgttaactatgtatttattattatcttttttatgtggtttaatcgtatcgaccatgaatatttttaatggtcaactatctgcccactgtggtgtttatctagcaaccgttattattcatttgattggtttaattacttttaccttgatcatgtttttaaaaaagcaagaaatttcctttaaacatcatttaccctttattttatacaccggcggagtaattggtgtactaactgtaatttttaatattatcgctgtcaataatatcggtacagctttgttaacagcattaggcttactgggtcaaatgattatttctatcatcctagaatctaaaggctggctagggtcattaaaaagaaaactaacaccacttaaatggttaagtttaataattgtcacaattggaattggagtgatggttaaatgattgcaataatatgtgcaatagctagcggtatgactattgttttaagccgttccataaatggatatttagcaaaaaaaatcggtccttatcaaagcactttctttaattactttactggtttgcttactagttcaattctcttattttttaccctgttaccagcattcaaaaacatttcatttacaaagatagatctaataatgttagttggaggaataattggtgtctttaatgttctaattttaaacatcgtcgtttccaaagttactccaatcaagctaactctaattacttttatctctcaattacttagtggaatgatactagactattatatctatcacgtcttcacccttaacaaattgattggttgtattatcgtcattattggattaattatatatcaatctgctgatataaaagtcatttcaaatgaagaaattaattctatctaataattttcctaattattttagattgtcgttgacaatctttttcatgattttattcaaatattctaacttagctttttcatatatctaacacatttgtaaaaaacagaccattactatattgagatcataaaatcctcataatttccttataaaaaattcaaaatgataactacaagtaataacataccgttcgcttatattttcctttgtacttcattctcctataaattaaatagctatctctttttatcatttctctcacctcatatagtatattttgtaaagataagcaaaaaaattaaaataataatttcttatttaaataacgaatataaatgacacacatgataatcgatgccatagaagcaataggtgatgcaatccccatatgaaataaagtaattccgctcaatttactaattactaaagttaatggaattcttaaaataaaggttgccagcaaactatgaagcatcgtaaaaacagtatatccaccaccatttaaataaccattataacaaaagataaaacttgtacataaacaatcaaaagaatatgtttgtaaatataaagccgcattttttattactgcctggtcactagaaaaaattcgtgtgaaaatacttccatcaaattgacaaacaactgtcacaatcaatgaaatcgaaagacaaaaagcaatcccataacgcattgatttatacgctcgtgaatactgctcggccccaaaattttgagctgtcatcgttgcaacagcattacctaaggcaattgctggtaacattaaaaattcaatcaatttttcaacaactccaacagaagcactagcaactaaccccataccattgacgattaccgtaatcaacaaaaaagaaataccaactaaagcactttgcaagccgattggtaacccaacttttgtgattttcgcaatcatcggaagattaaaactaatatcttggcgattaaacttaaaacctaatcctttatattttagatagatcaatgaaaaaataaaagctcctgcttgtgctaataccgttgcaatagcagctcctgctgctcccatttgatagccatctaccaaaataaaatctacaataacatttattacacacgcaattgcaacaaataaaagaggcgtcttactatcacctaaacctcttaaaatagcactaactgcattatatcctacaataaaaacagttcctaaactacaaatatataaataacttctagttgcactgattgcatcgttaggtgtatgcattaatcctacaatctgatgattagtcaaaaataatataattgaaatagtcacagcaatcatagtaaacaacacaactgaagaacccactgttgcagctaattctttttcctttttagctccaaaaaattgtcctaataatactgtgatccctgttgtaaacccaaggatcaggttagttagcatcgccattgtttgactaccgatagaaactgctgaaacatcacttgttgtagcgaaatgccccaccacaaataaatcagcagctccgtataatacttgtaataagtttgataacatgaagggaattgcaaagagcatcaaacttttaaaaacacttccatttaataattcatcattcatattttcctcctaaaaaaagctggataaaatagtggtttgacccactaccttatccagcataatttcttataccctccggtaagcaagaaaattttaccaagtttgcccttaactgtcaaactttttatttatttagtttctcttaagcaatattaagaaaggtttaattttattaattgaataaagtggtacaattcaagtatgaagaaactactaataatctgtttagtcctcctaacaggatgtactaacgcaaacgcaaaagtaaataaaatcgaacatcaagatatttttgatcaagtccaattaagtgattatcaaaatgttatgatcgtagctcatcctgatgatgaaactatttggggtggaatgcatttactaaaagataaatacttggttgtctgcctaactaatggtgataacgaaatacgttctaaagaatttaaagaggtgatgaaaaaaacacagaataccggacttattttaaattatcctgataagacaaatggtaagcgggataattggaaatcatcatatcaaaaaattgaagacgatttaaattatcttttatcgaaacaacattttaatctcgttgttactcacaatcctaaaggtgaatacggccatcagcatcacaagatgacaagtgcaattgttacaagtattgctaaagatctagcaattactaataatttaaaatattttggtctttattatcgaaaaactaaccctatcttgccaatgaaaccaacctttgatgatgatcttaccaaacaaaaattagaattagcagattgttactcctctcaaaagaaagtctgccataacttaggacatatgttcccatatgaaaactggatcagctacgatgagtggcattgatccagttttttatctaatatttgttttatcaatcaaacgatagtaatctaactttcgttcaagattctcttcataatttaattcaaagtaacaggtatataaaatatcaaaaatatataaaattgataatctagttgaaaaagatgaaatttttttataatgattttcaccagagctaatatataggtgatgattcggtttcacttcttttataggataattatatgaggaaattaaaataattggtgttttccgttccttcaagattctaaataagatatctgaaataattcctctaccgctatatgaaacaataatcgctagatgtgagttatcactagaagcagcctgaagtcgttgttgatattcatcaatcggcacatttatactcacaccaatttcctgcatttgaaattgaaagttttgtgcaaagtaaatatttccagctgatgtatatacatcaatgacttgagcctttttcattgttgaaacgactcgcttaagctggtctaaactaaataagttagcagtagaacttaaggtttgttcataatcttcttttagcttatgaataatttcataatgtgtctgaaattgcttaacaggaaaattaaagtcaaaattctctgtactttttaaatactcttctaaagaactagtgatttttagcttcagatcagcaaaccctgataattcaagcttatcacataagcgataaatcgttgctgttgagacataacaaactgtgcttaaatcttttgcagtcatttttaaaatacgatctggatgctctaaaatatagtctgcaatgattttttcattattcgatagaactttactattctttaatttcattaatatattcatctttattcaccacttttattttacaataaacaataccaaaaaacagtattatttatgttttaatatgatgctaaaaaactaaatttaatacttagtttcttttattatcactatttttaattcttaaagctaataattctaataaaacatattcttaagtttgttcaactttaatgattttaaaattaaggtactgtagctcttgaccaaacgattttattacctgtttttaatagttcataattaagcaacaagtcattataaattacaattactggtgatgaaagaatactcatgatagcttgtatcaataaagctaagcgttttttgtgttccttcaggaatacgactcaaatgtacacgttcagcaagtggtaatgataaaaattttacttcaccagcaaagttattacaacctgttaataactgtccattaatgactgtccctatttccacatttaaaccctgtagctaaaataaaaatactaatgattaatattttacaatatgtttattgtatttgcattttaaaatttgtttaaagtttataccacttatccccctcaataaaagatgaatagacatagctattatcaaacactccaaatatagaaatcgctatacaatcaatttctaaaaaatgtaacagtactatatttaaaacatcataaataccttgaattataatactatccttaataatccgcttttcataaatcatcaataactctttcccatatagatggtaatcaataaaattcttattattatcctgatatactaataaatataaggtaagattattagtgtttttattaataatttacggtgataattttattattgttttattgttatttaccttatctaataatagtgattctttgataaactcaaataattttaaacaatcatagcttgcaaatattagcgttggaatttttaaaactaatttattaggtagtattttttgtatctttgcacattggtaagatatttgtggagctaagagcagaacatcaaaatccaatgctgctgccaagaccttttcccagccaactgcttgaaattgataattcaattctaataattctgccgtttggctaagtttttcagcaaaataactagtcgtcaaaccgctagagcatgataataaaatttttaaaacaggttgtttgattgtgttataaatacattctatcatctcttcaaaaagtcttttagcgtgtcctaaattttgcatttgaaaatgaatataaaattttaatttattgtcattattattcatgacacaaagctcaataatattaaaacgattaaaggttacacgacttaaactattttcagcttcaataagtataatattggaatcattatcattgaaatacaatttataatccttactagtttgtagtaagatccattttttaaaatactctacataaagctcgcttaaaaattcatccataaaattatctcctagagacaagctattcgttaatgatttcaagcgctcgttttagcacattggcaccattcatcattccataatcacgcatattaattacttctacgggaactttaccctcagcggctttttgcagacccgttaactggtgcctaacttgtggccccaacataacaatatcccaatctaataaaactttttccgcctgcgtaaaccccattgctgtgacttctaattcaagctgttgttcttttgccgctttttccatctctcgaacaagtatactcgttgacataccagcattacatactaacaatattttcatctcattcacccctatttattataaaaatcatcgtacattttaagcgctgcagctaatactttctctccattcatcaatccgtaatcacgcatatcaataacatcaaacggaatcttccctgctaatattttcttaacattaggaataacataacgaacttgcggtcctaacagtaatacatcaaattcgcctaaatgctgttccaatgttttttcaccaatcgcttcaacactgacttccagtcctctattatcggcttcctctttcatcttgttcattaataagctggtagacatccctccagcacatgctaacataattctaatcattttcttttcctccttgactccattgtaaaaactatttggatataaaaaaatcgttttctattaaaacgaatttttcttttaatatattgccctatttacataaaaattatgagaaatttatttcatcattataagaataactaccagttctaatagttatatcttaatatcaaaccaaaataaattacataaaaaagagaagatactgctaccttcccctgaattcctaatctatatcttaataataatgacgttcaaatgtagcatatttcttatttaaaatgatatatgcaacaatcaagataattccagcaccagcacaaatagcaccatctaaacgtaaactccctaccggaatatcaatgctcattcctaatagacgatttccaatagtaaactccattgcactaacaactaatggcataaacaaaccaactacaatacctgaaataacagcagcgattccactaaataaagtccatttataaaatgatttattaatcaaaccaagtaaaactgctgttaaaataattcccaccacacaaataattctcgttggagtatcacttaaagttttataagttttaataaatttttgtgttcctggtgttgttttttggaccttttcaacggtacttacaattttattttgtaaggcaccattttcatcagtaatcttactttgaatttgttcacgctgctctgtagtgatttttttaccaattgcttcttcgattgcaggaatattttcatcaacagctttagataattgtgcagcaatcgcagcagtatcaacatcactaccatttgctacagctgctgtaatttgatctaataaatcgctcgtcacatcatttaaagcactattattttttactgcttcctcaactttcttgatattttcattacttacatcaggaaatgcttgattaagtacttcttcaatcccgttacttgcctcttgaacaacgacagcatttgtaattgctttagttgacattgtcttaattgatagattaacacataggagcataatcaaacataacatgacaattgttaatactacatttccaaatttcttcatttctttctcctcaataagatgccttgttccaatttctaaattataagatatcttttctaatgtatttattatagttttttttatctcttaagtcaaaaagagtgccaaatcacactctaattataccgttttctgcggtttgtatctttaacaatataaattggtcgagctttattttccatataatctttagacacatattctcctaatattgcaattaataacatttgtgttccacttaaaaataaaattaaacagacaatcgtagtatatccacctacgctatttccaaacatcaatgttgaaatcgctgtatataacgataaaataattgaaccaacaaataggataacaccaaatattcctgctatctttagtggagcagtagaaaatgagaaaattccttctaaagcataagaaaataagcttttaaaattccatttagtagaaccagcagccctttctacattattaaatggtaaccactttgtctcaaaaccaacatatgaaaataaacctttcatataacgattatactctctaatttctaaaattgaatcaaccataagacgactcatcattctaaaatctcctgcgccatcactcatatccaattttgataatttttgcatcaccttataaaatgacttacttaagaaatttcttaatctaccttcaccctcacgatccattctttttcccgcacaacaatcgtaaccttcttgacttactgcctgatacatcggtgccagcaattttgggggatgttggagatctgcatccatgattacacaataatcaccggttgatttttccaagccagcgaacatcgctgcttcttttccaaagttgcgagaaaatgaataatagtcacaatggtgatctttagcacagatcatctttaataaatcaattgtatgatcatgactaccatcatcaataaataagatttcataatcaatattttcaatcgtttcaagttctttagtcacttccttatggaataatggaagtacttcctcttcattataacaaggtacgattacactaattttgtccatattcatgtcctcctttggcagcaaaaatcttaaacttgcatagcccataatttgaaactactgtaattacactaactactacttttgatgacatctcatttgcagataataactgaataaaaataaataataatccgctttcaactaataatgtccctaatcttaaaataaagaattgataagcttcttttccagtttcattagcacttttaaaaacaaaatgtttattagcccaaaaagcgaagataacagcaccgacccaagagattacatttgcaaaaagccagccctgatccatcattgtaatcacaaaccaataaattacaaagttaattagcgttgtgcatccacctacaaatacataactaattaattctttcaaatcctttttcattctttttccttctcccttgaaatactaaccatataaaacccacaccactacaaacataaccaacatttttcattggagctttaaatataattctaatctggtgttgtcctttagaaatctttgctcctaaaaatgctttatttacacactccttagcaacttctttgccatcaattaataccgtatagccattttgatacggtaatgaagtaactaaatagccatcattactaacattgattgttccttctacaagattgccatcttgattatacgagccaactaatgcatcaatttcttgattacggtttttgattacatcatagtcaatcgtagaaacttttatattctttaaatcataacgtccattactgaaactaatactaagttggtcaagcaattcattttgacttaaaacatatgtaaaatgcgtattatgatttggataagcagcacttgaactagataacttattttttaccccattaatcgtaatactcgtatctttacgcttaattaatttaactttagctaaatcaaattccacaattaaaatcttattagttaaatcttgattgatccctaattctaatttacccgtctttttagtgttaatacgatagccatcatttaatttagttatttgtaaattatcgcttttttcttttacaactgtttctagtgcaaccgtagctgccttactttgataattactctgaccgcctgcaacaaccacattattataaatagtgtctaatgtttgtgggtaatctagacgatcaaactgcacaacatcatagctattactagttgcataaacaagcggcaatactttatcattttgatatagattattaccaattgcttgatatcccatcggtactacattttcactatagagcgtcttcactcccatcattccttgaaagaaaatatttgaatttgatagacaagcgacacgatttttaatactaataggatttttaataatatcgtaataaaaatgattatagagactattactaacggaactatagattgaacttctaagctcgttattactaacttgattgacagtgttcaatgactgtttaaaaatatcatatcgaccatctttttctactttaatattttttaaattcgaaacttgttgataagtgtcttttgtaacaaaactctctttttgattattaacatagctaattattaaaggcattaccaacaataaatataaagttcgttcagttattcttagatacaataatatcccaaccaaacaaattataatatctaaaataactaatggctctttataaaataagacaattggtaaaataagtagcacaattaattttaaatccaatttaatttgtgattgtttatactcattgattgtttgaattactacataaataatcaatggtgtaaaaggaagcaaaatcttggcccgaggatataaaaaaccatttaagacaaaactaaagatcgggataaataataacaataatagccagatcgataattttctcgtttcttttaattttaagcttagaactaaacctgcccatgcaacaaagcctaatccacaaccataagcattatacaatagggctttaaaatcacctcgtggcactactaacgacatcaaatcaagtgagccgccactactttgatggttttccagcataacataggcagttggaattaaaagaattccacaaataagcactccgatcaataacggctgaataaataaacataactttttaaaagtaattaggtttttcaatcgatacatttcaaaacaataatatgtaaaaattgttagtaaagctgaaattgcaaaaaaataactatttgcaattattagaaccactgctccaattaataacccttgcttttgatttttaatatatgtatctaccgcgatcaatgccaaaagcactccaggcatataatcaacaaacatgatttggcggtgactttggaataatacagaagaagataataataatacagctccaactatacatagcgttgtgctaaactgtttgcgtttcaaccatatataggtcaggttaacacttaaaactaaatttattatcatataggtaattataatatctttcattgctattccaggaataagacagccaattaatacgtcaggtcgaaacaatccataataagatatattataaatattttgaccaccgccgatattaaatgcaaaatcggggaaaaatgattttgtctctaacatcgtcttccgaatataatcagctagattgacatgttgcgatagccaatcagtattagctccaaagatactagaagaaggcgtgatgactatgatcatcactaaggttaaacatgttaaaaatataattgggtaaaactgcttttttttcattactatcattctcctgctcacattatcgtatatattccttaagaatcacctaaagaacatctaaatatttcttaattttcattttactatcttcttaatttccattatgatgtataataaatacgaaagttggtgaatatatgacgaacaataaaattttaattgtcgatgacaatcctgaaattagagaagtattaaatgttttgctctcaagtgaaggttatgatgtgattgaggctaaagatggccaagaagcaattgatatggttagtgatgatatcgatttatatattctcgatattatgatgcctataatcaatggttaccaagcctgtgttgaaattagaaaaaaatctaacgccccaatcttatttttaacagcaaaaggtcaagaaagtgacaaaacacttggtttttctagtggtggggatgattatttatcaaaaccattctcttataatgaattaacgacaagagtgaaggcattgttgcgtcgatactatgtttatcaagggaaaatggaaaaagaagaaaataatgatgacaacattgtttacaataatattactattaatcctaatagtgaagcagtgtatctaaacggagaacaaattgaattaacttacttagaataccaaattctttatcttttattaagtaatcgtaaaagaattttttcaacgcaaacattgtatgagagtatttggaatgaaccttattattatagtgctaataacacaattatggttcatattcgaaatcttcgtaaaaaaatagagagtgatcctcaaaatccaaaaataattaaaacaatttggggtaagggttatcgttgtgattaaaaatttctttaataaattaagtattcaaattagtgccattatcattatttgtggaaccttaggggtggcaactttttgtctactttatgccggtaaagaaagtttctttgaatttacccaaaacttaggggtcatctctgaaaatactgaagcttatgcaaataatattgaaaatcaaattattgatcaaaatgtatcaattactgatgtcgatactctagataagatcttaggtactagcgatatttatagtgtcaatctatataataaggctgataaccttgccattactggttcttttgctaccatgcttgacaattttatcatcggttcaacagtatatgatactgaagcaatttataacggtgacgattatagtacagaaattgagttaaaagatggaaccattgaaatgtatgtttactcatatgctttagctaaattagtcgttccttacatcgttgcctcaattgtcattgccttatttacctttttacttccaacctttttatttattcgacgtaaagtaaattatatgacaacattaaaaaatgaagttacaattatgtcacaaggtgatttagaccatacaatcaaaattaatagtaatgatgaaattgcagaattatctaatcaaattgataatcttcgcctaaccttaaaagacaactttgctactgaagaagctaatcgcaaagctaattatgaattagttacagcactttctcatgatttgcgaactcctttaacttctttaatgggatatttagatattattagactaaagaaatttaaaaatgaagatcaatataatttatatttgaaaaattcaattgataaagtaaatcaaattaatgaactagcaaataaaatgtttgaatactttctcgtctttagtaaagatcaagatactgaattatctaagatgtcactcggcgtaatttacgaatatattttagaaaatattggtgtcttagaagaaaatggttttgaagtaatcaaaaacattaagcattctgattactttattcgcggtaatattaatttagtcaaacgaattattaataatgttttttccaatgtcttaaaatacgcagatattaaacagcccgtttatatcactttattgatcgatgaagatattgaaaatctaggcttaacgattaaaaatacaaaaaaacatagtggtaactatattgaaagtaatcaaatcggtcttaaaagtgtccaacaaatgatcaagattcacgatggtacttttacagtccttgatgaagaaagtactttcacagtatcaattacaattcctttaatgcaataattagtgtataatgttgctataattttaattaaaaggagatattatgcaggcaatagcaaaatttcataaagtatctaaagaacaatttataattgatttcaaggacagttttcctaaatatgatgaggcagccattaatgatatatatgcttcaattaaattacctaagcgcgctactatcggttctgcgggttatgacttttatacccctatcgatttcattttaaaacctcatgaaacaattaaaattcctactggaattagagtttctatcaacgatgggtgggttcttgctatctttccaagaagcggacttggttttaaatatcgtttacaattaaacaatacagttggaatcattgatagtgattatttcaatagtgacaacgaaggtcatatttttattaaaataactaatgacagtaatgaagataaaacagttgaattaaaagctggccaaggttttggacaaggaatcttcctacgatacggtattgttgaagatgacaatacgactgatgaacgtaatggcggttttggttcaacaactaaataaaaaaatcagatggttgattatagtgaaccatctgatttttttataagttatttttattttcttgataatgttgtttaaatttaattgctattattaaacaaacaataattcctattaaaaatggaatcgctgaaaaaaaggcaacgtacggtggaaaactagtcgttttatgatgttcaatcaaacaatattgatatgccacaacaatacataataaatgtgataaaaataaagtcaaccccaaaaaactataatacatatactgataaaatttcatttcatccacctccatatgactttgttatgattcatttattccttcttttatcattataacatagtattttttatcaattcccatgattccctatttatttacaaaatctttagtaatatgttatcttttttgataatatattagtataggagggaattattatggatattttaatgaaatatgctaaaaagaaaactgtttttattttatcgacagttttgtcagggatagttacattattgtatttaatctcaaaattcggtccaacaacatcatctaatgttaatatcaatgatattaatgaattagctggaacgattggatcaatggttacaattattcaaattatattttatctatttattatattggccattgtaaccgccattcttagtggagtttattttttcaaaaaaaataagcaagaatacgtgatgctaggggaattcatcgtttcatgtatcaactcaatattattactattatcaatgtccggaatcaatgctatttgtaagattcttagagttgcaattagtggtgattattcatcacttatgactatggattcagcacgattacttagttccgtaactagcgctgcaagcaaccttaaatattttatgtatttatcaatttttgtatttattatcaatattgttttattattaattgttaaaaaaattattaatattgatgggtttcattttaattttgatgaaccagttgtaactgctgttccagctcaagaacctgttcatgaagattctacaactgtcgaagacgattctacgatagctgataatgagttaacacaagaaaacagagaaactgaaactaacacggttgaacctaatgcttctgaaactaaaccggcaactatcaatacacaaaaaatcaaagacttctttaaaacaaaaaacggaaaaataacgattggtgttgctgctgctcttattgtttgctttggtggttataaaatatatgatacattctttaattatactagtattgatctaggtaaaaatattactgttgaatttaccgggaaagacggaagtggttatataaaagatgttgaaagcaatatcgattatgacaaaaataattctgatttatctaactttgttagcagcacttatactgactatgatttttctggagatctatctaatggtgataaaataactgtaacgattaaatactcagaagaattggctaaagcaaataaaatcaaagtaactaatgattctaaaacttttactgttaaaggtctaattgaaaaatttaaagatagcagtaaaataccagaaaaagttattactcaattaaaaaaagaagctgacaaaaacataaagaatcgctataaagatggttattcttttacttataatcatgaatttaattctctttggtttgccaaaggggaagatgatgataacgacaatgttattgctatatataaaattgacgaaacatatacctcatcattcagtggccaacaagacgttgaaacttactatgccgcaatctatgtcgatgatgttgattctgcctatttagatgaaaagtcacattattggtatggggcttctttatatggcagtgatggtaaagaattatcagatctaaatgcattggaaactgctttaaaagaaaaatttgatgatcaaactttagaattaatcaaataaaaaactaaaaccactttttaaaatatttaagaagtggtttttttattccaaatcaaactgattattaaattattttcacttatcttagcagttacacttccatctcagtaaattctttaacaatagctaatcctaagccagtattttgttttgtacgagaaatatcagaagtataaaactcatcgaatatttgttcaactatgattggctcatctaatcgatttttgaattggaaacaaatttctgctcccgtattaatagaaatataaatatctccacggctatgcttcaaagcattaataattaaattatcaaaaattctccgtaagatccgttcattactaagcatctctatttttttattacctttaatatagatcatccgcccttgactattaaaatcttgataataacaaactaactcttcttcaaaaatacgattaatatctaataactttaattcaaatttttcttcattggaaatgattttagtaaaagtaaaaaaatcttctatcaattgcgatagctgttttaacttatcaataataattgattcatatttatgctgttcttctccacttagctcatatttttgcaacaattcgacatagcccaaggccgaagttaatggcgtttttaaatcatgagaaatatttacaattgttttttgcaaactattatttttcttttcaatatcaatctctaattttctaaacgttagcatcatttcatttacttcttgtaataattctctaagttcaagattcccgttagttgttgtaatcaaagcattagtatcaagcccacttattttattaatatcattagccgcttttctaatactttttttaaattaaaaatataacaggtagcaataagcagtaaaatgatcaaaattatcactattactaacattcagctacctcctgattatttaatattgtatcgtttaaaatacgttactcctatcatacttgaagcgatgatcaatccaattcctgttaaaattcctgttaacaatgtctttatttctatctgtccaataactgccatgtcccgaagaattgtttcaaactcaaattgcatgattatactaccatcaatattaaaaacagtaataattgtcattaatagcatctgtgataccataactaacacgattgcgattgcattatatcgtgatgttttttgtgttattgcggcaatcatcactagtacgctcattataccacaaaagatcggcaactgtcgcagcataattattgttatatctaaaaagctagaataatgactcggtgcattaaagataatattaccaaaataacctaaataagtactgattgctattattgctatccctaatccccatgtcaaaaggagcttagcgaaatagtatgtcgtccgtgaaacatctatagagataacatttttagcagtatgattagctaaatcaacacaaataactgcaaagactacaaaaatcagtacatagtacagattcccattaactttcatcatcccttcatctaatagctcattactctcaccagctacctttcttacatcttctggagttgctaaatcatcttctttagttacttctgaattactcgttaacccgccacttattccaatatgacctggcgatcttaaataaattgaaacactgcacagtgcgatgattgctagaagacaaacataaattccttttcctttaaaaatcctaaataaatcagctttaatgatattcaacattctattcaccatccctaataatatttttaaaatactcttctaacgatactccaatttcactaattgcataaagttcaattcccttttcaactattgccttactaacaatgtgttgtgcatctaaataatcatatagacgaatttcttgatcatttaagactttgtaattagctgtctttagttcttcttctaataagacactagctttttttatatcatttaccttaagtaataaacaatgactacactcattatctaactgttcttttgataattctttaacgatcttaccaccttcaagaattccaaacttatttgctactaaatacagttctgataaaatatgactagaaatcaaaatcgttatattttcttgttgtaattgcaataacgtttctctaatctcactaattcctaatggatctaaaccattgattggttcatctaaaattataaaatcaggattatttaaaattaccaaagcaattcctaaacgctgcttcattcctaatgaaaactgtttaaatttctttttaccagtattatttaatttaaccttttctagtacttcctcaatcttgtgacgatcaataattccttttaaaatacagtaatactttaaattatcatatgctgataaattaggataaaacgctggacttccaatcatacatcccatcctatttttactatccctcctacccttttactgtataaaaaaagagttaaataactcttaatcaattcttaaataagtcttaattccgttatccttttattttataaccaattccccagactgtttctatatactcttgatttggattagcttgttttaacttactacgaatcttactaatatgaacatttagcgtattatcatcacctgaatcttcgtggtcccaaaccatttcaaataaaatatcttttgtaaaaacacgagttggactttctaataatatttttaatagtttaaactcaattttagataaatttatttttatctcattacaagtcactttataactattttcatcaagaataatatctttataagtaattagagctgctagagctgatgaaaaagctacttgccgatgctttaattgtatctttactcttgctaaaggttcattattatcaaatggtttgatcaaatagtcatcagctcccaaagcaaataggtcaagttttgtatccattttatcgattgcagttaaaataatcaccggtaaatctttcttctttttgatttccttaattacttcctgaccactaagacccggtaacatcaaatccaaaagtactaaatctacatgttcatctaataaaagtaatgcctctgtcccagaataagcactaacactttcgatacaatttaatcttaatagatcatgaatcatattattaatatcattgtcatcttctacgatcaatatttttaccattgttatactacattccttcacttacacagtgatagtataacacaatatacctctccaagacatattggttttaagagcttatctttgtatttctaataataaaaagaagtatctaagtttagatacttctggattatgaattatgagcaaattgtgaattatacaatttttcatactcaccttgttttgctaataattcttcgtgtgttccttgttcgacgatatcaccattattgattactaaaatcaagtcagcactcttaatagttgatagacgatgggcaataacaaaacttgtccgccctttcataacccgctgcattgcttcttgcagcattttttctaaacgggtatcaaccgatgaagtcgcctcatcaagaatcaagatttgaggatcttttaagattgctcgggcaatcgttaataattgtttctccccttgcgagatgttattggcttcttcatttatatgtgaattatatccatctggcagagttctaataaaatgatgaacattggccattttagcagcattaataatctcatctttgcgagcatccaaacgaccataacgaatgttatcataaattgttccagaatatagccatgtatcctgtaaaaccattccaaacatagaacgtaactcttcccgtggtaaatcacgaatatcaacgccgtctattttaatactaccacctttaacatcgtaaaaacgtaatagtaaattaataattgttgtttttcctgctccagtcggtccaacaattgcaaccatctgaccacttttaacattaacattcaaatctttcattaagttttcttcataataaccaaacttaacatgttcaaaatcaacatttccagccacttcgctcaaatgtttaggcggattagcttccggtacttcttccggttcttccaataactcaatcacccttcctagtgctgcaaaagcagactgaatttgtgatgataagttagatatttgcgataaaggatcattaatttgccaaatataacgaataaaagcttgtaactgcccaactaaaaatgttcctgcaattacatcagcagttcccactacagcaactgccccaattgctaaataagtaactaatgcatttaaaggtgcaatcgttgatgaaacgaattgtgctttaaaggcattttcttttaaattttcattaatttttttaaatttttcaactgattccacttgttgattatataataaaatttcattatatcctgtatacatttcagttacagtactatttaattcaccaagcgcatcttgttgatttttaaataatttttgactttttcctacaactagcttagttactaatagcgataatggaataatcatcgttccaataattgccatcttaggattaatcatatacatcattgttaacgctaaagtaacagttaatactccactgacgatctgcgtaaaactttgttgtagagcgttagaaatagcatcaacatcattagtaattcgacttaaaacatctccaaaatgatgattatcaaaatatcttactggtaatttacgaatcttattttgtaaagcattacgaagatcttccattgcttgctgaattgcattcgtcaaataaactactgaaatcatttgagcaactgttttaataatataaatgactactaaactaagtacaattttaataattgccccaaagctaatatccacacttgttaaactactgcttttagcaacatcgctcgctaattgagtagtgatcattccttcaaatgttggtgctaaaaccattgaaatattgaaagcaaaaatcattaggatagcaataataaattgccatttatacggcttaataaatggtattaaaccctttaaactttttttaaaactatattttttatgcatttgctaattcctcctcacttaattgagaagttgcaatctcatgataaatttgacattcctttaataattgatgatgtgttccttttcctacgaccttaccttcatttaaaacaatgatctgatctgcctccataatactagaaattctttgagctacaactagcatgattgattcggtcatttctttttttaactctttccttaaaattgcatctgttttaaaatccaatgctgaaaaagaatcatcaaagatataaatttgagctttacgaactaatgcccgagcaatacttaatcgttgtttttgaccacccgaaacatttgtcgctccttcactgatttcttcatcaaagccattttctttttccattataaatggataagcctgcgcaactttagcagcatattctacttcttcatcactagcatcctttttcccaaaacgaatattatcagcaattgtcccactaaataatactgctttttgaggaatcacacctaatttatctcgtaattctaatacatcataatcacgaatatctttcccattgattttaatacttccactactaacatcataaaatcttggtactaaattcactaatgtacttttaccagaaccagtacttccaataaaagcaatcatttcgcctttgttcgctttaaaagaaacatcctgaagaaccggctcctcaccatcaggataaacaaaagttacatgatcaaactcaatacttactttttcatcaaaatcgctatctgcaggtttatttttaattattggatctaaattgaagacttcttcaattcgtttcgctgacacttcagtccgaggatacatcataaacaccgtacagaaaagcataatcgaaaacatcgcatggaataaataatccatgaaagcaacaagctgtccaatttctaaagaaccagtagaaattagatgagctgctacccaatatattgacaaaccagcaacattcatcagcataaagaaaattggctgtgtcatggtcataattttaaataatttttttgaatatttagtaaagcgatgatttgtttctttaaaccgtttttgttcatattgatcattattaaaagctctaattactcgaatcccgctaagattttctctcgaaatacgattcaagtcatctaatgaactttgttgattttctgaaattggtttagtaatcttcgctactacgacaaccccaaggataatcaacggaattgtagcagcaataatatatgataacggtaacgaagcccgcgctgtcataataaaactaaaaataaacataattggtgtcatcaaagctgtccgaagcaatacgttaacaaattgttgaatttgaaaagcgtcattattcgtccttgtaatcattgatgatgtcccaatctgattaaattcattagctgtaaattgttgtactttagcaaagatatcatttctaatatcacgagtaattgcagttgatatttttgaacaacaatatcctagggcaatggttccacccacaccgataagtgaaactaaggcaatacagccacccatcatatagatgaagctaacgtctttattagtaaccccaacatctatcattgttgctacaatggtcggaattcctaattcaactaaaataaatccaaaaactgaaattacattaaaaaagaatagtaatttgtagttttttaaatactttaagattaatttcatatttttctcctttcattgtattgtgaagcaacatatcatatgataaactataaggtaaccttatagtcaaggagttatttaaatgaaagaaaaattattaacatgtggaacttttgctaaaatatgcggtgttgaaaaacatgttctttttcattatgacgagattaatttatttaaaccagcatatgtgaatgataaaggttaccgctattactcgtatcgtcaatatgatacatttaaagtaattattgctttaaaaaaactcggaatgtcgttaaaagatattcaaatatatcttgatcagcgcaatccccaattatttttagagttattgaatcaacaagaagctaaattgcttgagtatattaatgaaatgcagcagattcacgaaatgatcaaaaattttcaaacatttacaactgatgctttaaatgctaattatgatgaaatcaaagtaacttatttaaaagaaactaaattattattatctgctaatctcgaaaacactacctctaaaggcttcgctgactttatgaatgattacacatcttttattgaaaataatcatattattactggtgaattcgttggggtaatgatgaatgtcgaaaatattcgtaaaaatcaattatctaactactcttatttatttacaacaactaataatctgagtgaacaaatatttgttaaaaagggtggtaattatttatgtggctatcatcatggaagttatgatggtctccgtgactcatatcaaagaatcctcgattatgcagagcttcataaaattaaattaggtaaatatgcttttgaagaatatattatttttgatatttgtgaagcttccaaagatgaatacttaactcgtattacaattgaaatagcagaataaaaaagtaggtataagactcccaagttaaataaccaatgggcaggaagatcttaaattacctacttttacttataatttttaaaatttactaattctatcttatttttatttaaccattcacttaaccaatcggaacaaagaaaatcacattccataggtctaataagagtaaaagacgaatgttccaaaatatactgatctaaaaacccaggatggaaaatagctactgcacaaggattatttttaataatatctaaatgctcttccatatatgtacgaggatcatacaatccatgttcatctaggctcataaatcctaatccagtaattccaaattctttttcccactctttatccaagctaggattttcaaagaataaattatttctttgagcaacattttttaaagcaataaagaaattattagaaaatactgcatgaccttcaaaataatctgggtctctacctgtgattgctcgaaacttcgctaattgagcttccagctcaatttcacattcagcaacattgatcgtatctacttgacgagcccgaatctctttactggaacaaaaattaccatttttctggactaacgacggaatcaatttaggatcactcaacggttttccaacacaaatattactgtgctgtcctaatgcgatatctaaatctttaaccaactcatacccatgcttagcacttgccatattaggcatcattccaacactagtgattacaccatctactacacttttataaataccataatttacgccctcgctaaacccgaggtcatcagctctcattattaatttcatatttctcaatactctcctttactttttttctttttttatctatttcctgattataaactcgtttgatataatccaatacttttcgtccgtcaaacgaagcatataaactaataggcggaactgttataattgtcagattctcttttaaacgtcgctcaagatttacttcttcataacgaatttgaggctccaataaaataatgtcataatttttatcctcaaactgctctgtagttagcgattcaatctgccaatccttttcatcaccaattacttttttcttcatatctagaacaatcaaatcagacattgctccagcaacactatgtaataataaaactttaaacggatgttctttagtaaactcatttaataacataattgctttatctaacacaattttacctgccatcttagtataatcataactatcaatcagcattaatggaatattaactttttgacagagcggcacaaattcattttgtaaatatgcaatatgtggagccaataaaataatatcataatctaccagcaaaacttggccactgacaacatcactacatttaatttgatattcgttataaatgtctgctgcttccattttttttaccaaaagactagtcgacatcccaccaccacaaaccaaaagaatttttttcatagcctctctaacctttcaatgatttctttaaaatactgataattaggattattgattaaattccactgaattgtactatcgctaataatattggaaattattttataaaagtcatctaattctttaattgctttattttcaattgcagataataaaattattctaattttatgtttcttccataataatggtttctttaaaatcgtaacagctacaaaagtagcattagaaaccggtttattagaatgcggaaaagcaattaaatcattgaattcagttgttgccagcgcctctctttgaagcacatactgttcaaaatctgcaggtagatcataactttttttgcactcattaattatttcatgaattgcctcttctttggaactaaatgattcatatgtaaaaaagagctgttctggaaaataatctagtatattagcctgatttaactgctttaaattatttgttattttaattgtatccctttgattaataagattattaattaaaaagattggaatatttactttaattgctaaaggaactgtcgtaaagatacaatcaaacttagttaaactaatgttttccagctcatgcaatgagcatacttcaagatgttcaatataatcattgaaattttctttaaagaaatattctaatagacgcgcgctccccaccccgctagaacaaacgaccaaaatattattacgatgaaaattatactttttttgttctagagacaaattaatatgtaaagcaaaataagctatttcatcttctgataaagtacagttaaaacgttgattgattacaacacaagctttaaccgctaattcataagccataatcagcttacttttaatctcatcctttaatggattatgcataaaggtaccgtactgaatccgttttactaatggaatcaaatgcaaagataatgctaattggagatttaaatctgcttgaaatggaatattagcaactttttcaattatcattaacatttcttttacaatatctaagatttcttgatttatataattattagaaagttgtttactgtttttaccacaaagatgcatagttagataggcaacctcttcaattcgatactccattgccattattttattcatcaactccataattgcacaacctaatgaatattctttctcttctttaatttcctcaagccattcagaatcaatattagcatattcttttttcatgacccgataataagcaatatataaatgcgcaactaggttatctaatacatcatcactaattacataatcagcatttgcaatagatgaaattacaatatctctaattcgctgaagaatatcaaagtccatttgatactcttcgaaatgagcaattgcacgtcgtttattaatttcatcaccttctaagtacataccataatatgctttagttgcaattgtaagatcaaaatcatgtaaatattctcttaattcttttaaactttgttttaattgtgttcgagataaataaagttcatcacatagatcatcgattttaagataattattacaatcaataaatcgattaaacaaataagctaatcgtgattcctctttaccattttgatctctttgtagatatgctaaaaaagtttctggtgtttcaattgttaaacgataaccaaaacttcctgattctattttagcaccgcagatatcttcattaatattcttaataatagtgcgaaccgaacgagtactcattttaattacgcttgataaatttgaaccactgacagtttcatgattcattagttccaaaattatcatcttttgattcttatccatcatccgcacctccgtttatattttatcataaagtatgataaagaggctggaaatccagcctaattttattccttgatctgtgcttcttctttaagagcgatgttatcttgtgttttaaaaaatggataatataaaattgcagatacaataattaaaacaatttctaaaataattcctgatactccgcaaattaaccagccatctaataataccggtgttcctgtcgctcccattgcaattcttggtaatgaaaccagaccactcttcattgcaaaataagtaattaaaatattaatttgtggtactaagaaatatggtaaagccataattggatttaaaatcagcggtaatccaaaaactattggttcattgatactacaacaagatggtaaaattgctaaccgtcctaacgttttatagcgattacttttagcaagtaacatatcaatagataatccaagcgtattaccaataccacctaacattaagaaatataacaacccaacagtaataatattttgcattggtgcccctgatgcaaaggctgcttgattttcaactccagcctgcataaatagcatcattgagaatggtatcgttacttgaccaccatgaataccaaagaaccaaaaaacagacgctaacaaagttaagaccatataagtaattaagctacctgataatgctgataatggagtcgcaataataccatagaaccattcactaaacgttacccctgttaatgaagcaaaagctccgttaatgattagaaatactgtcgttataacaaagccaggaattaatgcattaaacgatttggcaactgttggtggtacgccctcgggcattttgatgatccagccacgtttaacaacaaacgtataaatatagccaactaagattcctacgatcaaggccgtaaataatccctttgaacctaaatagtcaaaagcaatataacttgtagttgtttcttcaacgacaatatttgctagtggtgtcataataaagaaagctaaaattgacaacaaaccggcaggtatggcatctgtattcatgccttcatttcttataaaggcatacgcagcagtaaaagatacatatactgctaacatatcagttgtaaatttacccactaaacttaaaactgttccgacccccgagtcagctaaaaattgttgatatgcatctagtgataaagtactcagcagagtaaatattgctcctaaaataattagtggcattattaaattaaaagctgttgatattgcttttaaaattttattactccctatctttgttgctaatggtgctaaaacattctccatcttgtccattaatttttgcattaaaactatcccctttcatatttacaatatcattatataataccctaataaaactagaagtctgttaatttcctgttattgtaggaaaattatattttcttataaatatcgataaattctttaatcagtgatttatataactgaactgaaattaacatatcttcggcatgcactaataataaatctaaatcacttgaaactgttaaacatccagcatgaatcttacttgcttcaagtaatgtttcgttacccttaattaagtattcattagccttgacaaagttttgatctttgacatatgctaagaccttttgataagctagactgctttgccgggttaattgtatgattgatattgtttcctgctcggtattatttatcatattatcaactcctgcttttatcatacaaaaccttcatttgtatctaaagacaggatatttccacttaggcggaaatattgacaaagaacttttagtaattattttaatgataccaagaaacaagcagtttacctttcatttattaagaaaaaatgataatcttataagtacggaggtaacatacatgaaacaaataaaaaatataaatattgaaactttagaaaataatttaatttatccaatctatgaaaatcaactaattgatccacaattaaataaagttctagattacaatcttgataaacttgttaataagaagtttaaagaactaactgtaattcatactttaggaaaatataaatttgaaacaattacatttattggtttaggttcttcaaaaaaaataacaagcaaacaaataagagatattgctgctttaattaaattagatgaacatgctactatttatcttgaagggataaacactgatcatcttgatattcatacaattacaagagcttttatcgaaagttatttacaaaattcatatcaagaacataaaattggtcatgagccaaaagtaattcatgaatttgatataatatttagccaggctgaacttgaaaatgatatccaattagggaaagtttatggtgagggaattaattatgcgcggatgcttagcgatacaccatcaaatttaatgacacctgataccctggttgatgaagcgataaagcttagtcaaaaatatccacaactagaatgcacaatcttaaataaaagtaatttagaaaaaatggaagctggaggaattttatcagttaatcaaggcagcaatattcctgcttatatgatttgtttaaaatataataatagtgacgatccttatactgctgtaattggtaaaggcttaacatttgattccggtggttataatcttaaaagtgacagttatggtatgaaatatgatatgtgtggtggtgctgatgttttaggagtaatgcaaatcttagcagctagtcaggccaaagcaaatgtctatggaatcattccaacaacagaaaatcttgttagtgacaaagcttacaaacctcaagatgttattacaaccctctctaaaaaaacagtcgaaatcgttagcactgatgcagagggacgattaattttatgtgatgctattacatatgtccaacaacttggagtgaagaaaatcattgatcttgcaacccttaccggcgcttgtgtttcagcacttggtgatgtatataccggtgttttcagtaattgtgatgaatactatgatgaatttgtccaagcgttacagattagtgatgaaaaaggttggcgccttccgcttgatcctgaatattttgaaaaattaaaatcaactagtgctgatttcaaaaactcagctggtaaacctggaggcggagctagtgttgcagcgaactttttagaagcttttatcgaagaaggaacacaatggttacatcttgatatcgccggtagtgctgacaatgatggaaccgaagctactggtgcgatgattcgtagtgttgtaaatatgattaacttaaaaacaatagtcaaaaagtgagcgtatcaaataatactctcactttttttcttaaaaaacattaatgccataaaaaaatacattcgtgccatactcattttctatcttatgattattcatataatgatagatgtaaggaggaattaaaaatgaaagacaaaattttaattggtgaaaaaatgacgaaaaaaggagtgttccttaactatttaggtttagtattttttggaattattgcggtagttggctataatggattaatttctaaatatcttcatctaaataatcagcttaatattctaatcatgatatttatctttattgcggttttgctattcttaaccccaatcatcggctctagtgaaataattgaattcaatcataatgaagtccgctacttccacactaagggatatttccaacaatttgctgaagttattagaattcttacaggtaaacaagcagtccctgatattactttaaaaacaaaggacattgaacaagttaatttatcatatgtaccatttttaatgatgtatgctcaacaaggttatcaaattaaaataactttcctaatgaaagatggaactactctagcatttttaccaagtactattgatcaaatggaaaaaggagattatgaatctgcatttaagattttagaaacaaatggtgtagaaattgttgataaattaatgcttagaaaagcattgaagatgaataagaatgatttttatcaatatgttaatacgattgaaaaaggacgtaataaaaaatgaaagttattttagaatgttctcatcaatatatcaacacaataaagcgaaaacttaatgcacatttagagcaaataacttatttagattcatttacgggtaatgatctatcattatttattaaagaagtaaaaaaccttgaagacattgaaaacattaaaaatattaaaagtatttcaaacgctaatattgtttgtctaattgacagtggtttatttatgtttgagcttttagaatttaacccacttgcctttattcgaagtgccaatattaatgccgatcttgatgaattaatcaaccggattgagtacctcaataaaggcctaggggtaatgcttgaatttcaatgtggttatcaaacagttagaatgaatgtaaaaaatattacttatgttgaatcatatgctcattatcttttaattcacacattaaattcaacggttaaggttagagaaaaaatatcagtggctttacaaaaacttgaaccctttggttttatccaagtacatcgatcatatgtcattaatcatgaccggattaaaaaaatagatactgataatattacgttatctgatgaaactatcattcctattggaaaaaaatataagcaggctctaaagaatcattaatcttcctatattgtaagttatctctttaagaataaaacatccccttattaggaggatgttttattcttaattaatgtcattttcttaaaaactactaattatcatattacgatttatcaaaaattgtttccatatgaactttctgtggtttaagtccacatgattcataaaatttcatcgctgatgcattacagctccaaacattgagtgttaaattataacatccgctcttttgggcaaaatctttggaatattcataaagctgcttacctatatgttgccctcttgaattttcatcaacacatagatcatcaatatataatgtttttacatctgttaaaatattgctatctaaatattgttcaaaaatacaaaatacatagcctaaaacaacttcattattatcaactgcaacgaagattggtctattatcatctttgattatttgcataagctgatcatcactatattttcttgccccttttttaaataaatccggtcttcccttatgatgcacaagacaaacttgtttcaacaaattattgatctgagtaatatctctattttctgctctacgaattaacatgactgcctccttaaataaccctcaattcttaatattatccttcataatacctatagacttattttcatttatcaactattaattatactacttttttactaaattataatactttcaaattaatttcttcaaaaatcctcttattatctcccttaatcagtttctataaatatttaaaaaaattataaccatgctctttttacataaagtaaaaagtctagattttaatatctagactaactatcctctttgatgacgaggaatgaatgttcttatttcttcttcattgtatccaacttgaaaacgatgctcatccattagaattggtctttttaaaattgaaggattggctttaatgaaggcgattaattcatccattttcatattatcaaaatcaattttatttgatttaattattttactatttttagaaagaatatcatctgttccgttttcacagcgctctaaaatttcacgtaattcattagcatgcaaatcagacgaaaaaatatttttttcaataaaactcaaattatgctcttttaaccaggcaataacttttcgacatgactgacttcctggagctgtatatactcgaatcataataatcctccatctataaaataaggactattactagcccttcataaacattgtcctacaaattctttttcccatatttgttttaaagattttttgataagcactgttaatcgccatttcttcactttcgctttcaaaaagattaactaaaaaatctgcttcaaccaaaatttgataatctaaaccatctatttcactataagtatgatgatgaccaacaagataagcaactcgttctattaaagcttcatcataatttaaacgatttagcagcttaatcgcttctgccggtcctaactcttcttgatacttaccattagaactattatatttttcccaagcaggtttaattccaatatcatgaacaattgcggcaacttccaatctttcttgttcttgtgtagataacccctcatcaattccgattactctagcaaagctgtggactttaatcaaatgctgaatttgtttagggtgcccttgataaaaatcaatcatcgctaatattaaatcatttatcttcattatttttttacccttaatgtaataatatattcatcgtcagcttcttcagtttcactaataacttcaattcccgatttttgaatcaattccgtagcttgattgattgtattgattgcgattttaaaattacgagatactttagttggaccttttttatttttaggttttgttttaactggtttactaatcaaagactctgtttgttttacatttaatgatttttttaagacttcttgcaataccgtttgctgtttatcagcttccaagccaatcattgcacgggcatggcgctctgtaatctgttttgattttaaagcatgtttaacatcatctgataactttaataaccgtaatttattagcaatcgtcgactgttttttccctactttattagctaattcggtttgattcatatcatatgtatcaatcaatgttttatatgcattggcttcctcgatcggtgataagttttcacgctgaatattttcaatgattgctaatgtatcaacttgtttatcatcaatatctttaataacgcaaggcactgtttttaatcctgctaacttacttgctcgataacgacgttctcctgcaacaatttgatatccacgattatatttacgtacaataatcggctggatcaaaccattctctttgattgaagctgctaattcctcaatcttttcatcatcaaaaacagttcttggttgattttcattcgctgaaattttttcaatatcaatttgtttatatactttctctaacataacttctcctataggggttgtttttttatttttccaaacattcgtggatatttggctggagtatcccttaccttttttataatgatattacttcgatgattatcatttgttaaagtaaaatcaattgatttttccacttgaccacctaacaaaacaatgcccttaccagcttcctctaattcttccgtagcctttaaccctttaagggctaaaaagtatcctcctactttcactaaaggtaagcacagctcatcaagaatatttaaacgggctactgcgcgcgccataacaatatcacatttttggcgatgatctttagcataatcttctgctcttgcgctaatagcttgacaattacttaaatttaattctttaaataaatgatttaagaatgtgattctttttgttagtgaatcaactatagtaatttttaactcaggatatacaatttttaatggtacactaggaaatcctgccccagcacccacatcaacaatactttgatcagtaaaatcaaaatcaaaagcaatcgttaatgaatcataaaaatgttttaaataaaccccttcttcatcagtaattgctgttaaattcattttttcattccattcaaccaatatcttaaaatattgtttaaattgattgacttgttggggggttaaagtaattcctttagtttctaattgtttaatgaattctaattcattcatgtctattcctcattatatttctgttttaaatagattaataaaacggatatatccgcaggattgattccggaaatacgtgatgcctgtccaatcgttagtggccgaatttttgataacttttgctttgcttctaatgctaaattgctaatatcttcataatcaatatctgccggaattttcttttcttccattttgacttgcttgtcagcctgacgtcgagccttatcaatatatcccttatatttaattaaaatagtcacccgtttacgttgttcttcacttagttttggagcttcaacatatggtaagattttttcatatgttaattctggccttttgattaattctttagcactaatgccttccgttaaacgtgctgaaccaaaatgctccaaagcatcattgatctcatgtttaggagtaaaacgaatcgtatccaaacgatcaatttctgcaaaaatttctgacattttatcaagataagcctggtatatttgatcacttactaatcccacatcatgtccatacttcattagtctttcatctgcattatcatgacgaatcaataaacggtactcagctctacttgtcaacattcggtatggctcatcagttcctttagtcactaaatcatcaatcattaccccaatataagcctcatcgcgttttaaaatcaatggctcttttccttgattttttaaagttgcattaattcctgcaatcaaaccttgacctgccgcttcttcatatccacttgttccattaatttgaccagcagtaaatagatttttaattatttttgtttccaatgatggccataattgtagtggatctatagcatcatactcaattgcataagcatactttaaaatcttacaattttctaatcctgggatagtccgaatcatttcttcttgaacatcatgtggtaatgaagttgaaaaaccttgcacataaatcgtatccatctctgctgattcaggttccaagaagatttgatgttgtggtttatccgaaaatttaacaatcttatcttcaatcgatgggcaatagcgtggtccaattcctttcacaataccactgtacatacttgaacgatgtagattatcacgaataatctgatgagttttttcattagtgtaagtcagataacatggtgtttgttcttcaataggaataaactcattagtttgataactaaatgccaaattagcatcagttcctggctgtaaacttgtctttgagtaatcaacactattaatctctactcgaggtggtgttcccgtcttaagccgttgaatccgcatccctaaattagctaatttttctgataaatattttgattctttctgctgatcaggaccacttgcatgcttttgatcaccacataaaatctctgcttttagatatgtaccagttgttaagataaccatccttccttcaatagtttggccattatccaaaataactccttttacacaattatcttcaacaatcaaatcctctaccattccctcaatgatatcaagattctcctgtttttttaatacttcttgcatatatcgaggatatacttttttatcagcttgagcccgtaaagattgaacccctggacctttagcggtgtttaacattttcatttgtaagtaggttttatcagcagttttaggcatttgtcctcctaatgcatctatttcccggacaataattcctttagctggtcccccgattgatgtattacaaggaaggcttccaacattatcaaagttagaagtaactaaaactgttttctgattcattctcgctggtgccaacgctgcctcaattcctgcgtgcccaccaccgactactataatatcgtacattatatttccctccttaatcctaatctattgtactacaaatttcctatttttaaaacaataatcattagattgtcaattcatacaaaccaaggataattaaaataattcctgagattatatcagcgtattttcccttaaaatttaatcgcttaaatttttgaccagttccaataaaaacataactacaaacaaaggttgttaaagaagtaatcaactccggcattccagtaatacttgcaccaattcctaaagctacattattaatggttaaaaccaatgataagactaaagtttcttttaaagaaatattttttactgctgataaatgattagtaacaatgatctcatcacactctttcaatgacttaacaacagtatagattcctattaatagtaacagactgcttcctaaaaagtctgccaatgataaagaaatataattagttaaaaaatgtccaaagcgcattgcaccataagtaccgatcattgtaataaatgcaatcataaaatttttttgatgattaatatgtgtttttttgatcccataagctattccgatgcttagagcatcgatattcgcggatacagcgtagagaactgctgaaaatatatgcataaactcaccccatctaatttatgcataataaccatttagctctgggcatcaggaaataaatttagtaattatggtatactataataaggagtcgaataattatgaaaaataaaaaaactaattttatttataaaagctgtattttaatctatcttatttctctagtttacgctttttatcttaactggggaggaaaatattttagtatgacaatcgttgcttgtcttaccccattcattatgcctttattaatgaaattgttaaaaatagaagttcctcaagaattttatattatcaatatcatttttgtctattttgcaagtttgtgggggagttgtttagggggttatcatcttccatattttgataagttcacccattttttcagtggaattattttttgtgagatagcttatatcttttataaacactttttacctaatgaaaaaagaaaatttttgatgtttattttcattaatgcccttaatgcgatgattgccttattttgggaattttatgaatatgctctattgatcttttttaactatgatgcaattaatcattactcaacaggcattcacgatagtattaccgatatgctggtagctgtaattggtagtttcattttaagcttatatcttactcattacgatcagcgtaatgataatcatttttttattaaattagctaaaaatattaaatttaacaaaacttctcatcctaactaatttcatctaaggaggaagctgtgtatcaacttaatggtgtttgcatgatttggcatacgacaaaaagcaatatattactacgacaccaaggtttgataaagatatcctatgatattcatagtagaaaagtgattaatgataataatgttaatttaatcaaatacacctgtttttatcgttaatctgattattctattctccaacaattattagagatattttgtattaaaaaaatagctgttagaaaataaattaaacaactatcaaagctagcagtaaataattgaaaatttcattgctgctagccaaataaattttgattataactcacacacagattctcttcatttgcatttaactggtacttgtcaaccttaaactttacattgtagtaaagaaaaatatcggctaattaatctttgactcatttagcaacaataggctttttgattcatttcttattaatcattatttataatctaggagatcactaaacgttctatacaataaaaacaatgatcgagaactgcaatattataatactggtattttatcacctgctttaaaaaatggtaaaatcgaatctatacggataaagaagttttaatcatgaatcaaattaagtttcataagcgtcttggtcttatactcgatgaaatctacgatatttttaattcatctactcgtcaagaacaactgaatgctttattattaaaaaaactcactgacttaaagcttaaaattgattcttgttatacatcacttgataaaagtaactctctattaaattatgattataaggatattcctactttaaaacactattttaataattatctcgtttcatcagtttcttaaattatttttaatttagtcatctacaccagaatatttaaaacaatcagtcagcttatttaagaattaataaagcactcccagatttggtcattcaaatcccgaagtgcttttttctttaagcttcaatcaattcatcatcaacattatcatttatttcttcaacaatctcttgctttggggctctaggtttaataatactaattaccttaccaaagaaaacaaatgtcattgcgtaaaagaaataactaaatgtatttgacataaaataagcaacgatctcaccaaagtttgcgccccacgagatacttcctgcttcaacatatgagactacagattgataagatatatttacagtatacccaaaataacagattatcaataaagctattgcataacaaattagcgtaaacgctggtttataaaaccaattcttaattttttccatttttaaatccctttctatttttaagatattttaacgagaaaataccgaataaatatgtgatgaatacctaattgtatggttacactaaaaacttatttcactaattgaaaatattttaaattattttgtcgtaaatgctatgataaagccaataaaggagttgaattgtatgattgatattttaattaaggccggtggctttattttaattattatgttaggatttgcactaaagacaaaaggggtctgtacccgtgaacacggaagttttttatcaacaatcattatgaatataacgcttccatgctcattactttcatcaattaataaccttgagattacccccatcctattagtagcccttgcttgtggcttcttaggcaatgttattactaacctttctggttacttgattcaaaaaaaagaatcacccatgaccagagctctatcgatgatcaactcatctggctataatatcggaacttttactttaccatttgttcaaagtttctttccatctaacttgattggttatgtttgtctttttgataccggcaatgctttaatgtgtttaggaggtacttatagtgctgctagtacagttgtagctaatgaagaaaaacaaagctttaaaactgttgctaaaaaattattttcatcaattcctttttgcacttacatcattttgtttttcttatctttatttcatattgcaattcctacacaaattttaacagttactagtattgctggtaatgctaatgcttttttagcaatgttaatgattggaattttattggaaataaaattagatttatcacaaatcagactgattaaaaaaatacttttaaaccgctatgcagttactttggggttatccttatttgtatattttattttaccaattgatttaactgttaaaaaaatgattattttatgcttatgttcgccaatatcagctgttgccccagttttctcaaatcgtttaggaagtcgttccccagttccttcagcaatcaactctttaagtattattattagtatttttattatgacgattttaatcttatttatggtttaataaaccggtatttctttatgtattgattaaattgaatgatttgtcgtatttatttaatacgtgatacaaagggattctcacaatacttcttacagccacatcaacaaggcgaacccctttttcaatatcatttgctaatcgctcttttaaacttttctcatctactaaaagcaaaatacgctttacttcacaatcaataaaatctaatcattctaaacacatatcaataattttttgttcatgtatcacctaacaaaaaaactagtcattaatttgactagtttatttccagaagttttttccacttcctactgagataattttaaattgggtattctttgatgttccaccagtaaaatatttaccagcttcagtcccattaaagatatcaatcttgttacctttaattgcaccaccacgatctacaacaatcccatatgcagttgattcaatacttaaattatgattagtaatttcaataattgttccaaaaggaattgaaggatctgcagctaagcaataatatgaacgtccattatatgttaatttaggactgtttgatccttgtactccagaaatcggacttaatttaatgccggttgatgaagttccatttcctccagcacagtcgcctccataagtagtcagtcttccagtaaagaatgctccttcttggactgcacctgtttcaattattgtatcagtagcttgtgataccacctgactaccaattaattctcttcctacttcgttaccattttcataagttacgcggtaagtgtttttcacttgcccgttttgcccttgttgcgcaactttcgtagtaaataactctaatccagttgtatttaccgtatttgattctactgtaatcatctcgtctatatccgcttgattaactcgagtgatttgtattaaatcacctttatttacaatataatttaaatctaaatttaaaatatcttgaggatttacactgatttttaaatcatcaagaacacttgatactgacgcttgtctaattaaatagtccttttggtcttgatttccatcttgaacttttacatcaattgtttccacgtagttatcaatttggtttgttgctccagcatttaatgttgtcgctacaattccaatataggcaatcattactacaagtaaccctttcattctggggtctgcattaataatagcctctttaatttttttcattaattttcctcctatttaataccaaaaagttttttggcattaaacgttgtcgcacttgcaacgttttctatctccatgttctttagcttagctatttcctgggcaatatacacaacatttgcaggctcatttaactttcccctaaatggatgaggtgttaaataaggacagtcagtttcaattaataaattctctaagttaatagttgctgccacatcttttggaactcttgcattcttaaatgtcaccggacccgctaaagaaatgtaataaccaagttttacaaatctttctgccatttcaacagagccactataacaatgcatcactccaggatgtccattccgttttagtacttcgtaagtgtcctcataggcgtcgcgacaatgaattacaactggcttttggtgcttcttagctaagtccatctgccattgaaatacttccatctgcttttccttaggaacactgtcccaataataatcgagaccaatttctccgagtgctactacgcaaggttcttctaagtacttgtcgatgatgttcatttgatcttttgttgtgtttaagcaatcgtttggtccgataccaactgcagcatatacgaactcatattgtttagctaattcgattgcaatttgagacgactttaagtcatagcctacgacaaccatattggtaacattgttatctagggctttttgaacaaacacatcgtgatcttcatataattcatcactattcaagtgacaatgagtatcaaagtacataaatctcacctccgctgtatattaacaaaatcaattacatttgtcaaatatctaaactccaaggcactagctgcaaagaaaaaactatgataaaatcgatatttttttattactatattcctttttccacatattttaacatacaaatttcgataaaacataaattttttaagaaaaataccatgtttttgtagagaaacgtaataaaataatcaagttgattttacaacctaatttttgacaaagtaatcatttttatactaatatcacaaaaaaacaagcagagggaaagctgcttgtttcaagtaatacagatagagggaaagctatctgtttttatttagatatcagggaaaggatatcatgaagagtaatttattgtagaaagaattgttatctttactacaattaacagtatagtaagtaaatatcgttagatttaatcaaaaatacctaaaattaactattaaatatggataaatatgttaatggataagagtataaaatacaattgttatgatttggttacgtttgattagtttcgttgactcctattattgcctatgctattattttggcatcgaataagtggtggagtctgtcataaagcaaaatgctttatttattcgatgtaagcttacgattaaaagaactattttgatagttaagtaaattacgatttagacagattcaagaaagaatctgtcttttttattttgacaggccttgaggagggataacgggtatcgttataaatatattttttggtttttaattttagggaatgagtattaggagaattgtcgtatgaatattaatgaagataatgaattgaataattatcaaataatgtatgtgaccccggttgaggcctataccttaatggaaagtagtatggacggtttatctgaagaacaggtatcacatcgtctcaaaaagtatggtaagaatgagatttccaaaaagaaacaaagttcaatgtttaaaaaactaatttctaattttactagtctaatggcattactattatggggtggaggattactagctatcctttctggaacagtcgaattaggaatatcgattttctgtgtcaatctaattaatggcttcttttctttcttccaagaatttaaagcagaaaaagcaactagtgcgttgcaaaagatgatgccatcttatgcccgagtagtacgtgatggtaaagaagtaaaaatatttgctgaggacattgttcctggtgatataatgattttagaagaaggtgaccgaatttgtggggatgctagaatcttacgttgtagtgatttccaagtagatcaatcaactttgacaggtgaaagtaatccaattagaaagaattatgaggcactgcaagaaaaagtttcatacttagaagctgaaaatatgatctttaccggtactactgttgcttctggtacttgccactgtgttgttgttgcaactggaatggatagtgaatttgggaaaattgctaatttaactcaaaatactgaaaaaagcttatctccattacaaaaagaacttaatgttctaactaaacaaattgcaattattgcattaagtgttggaatcgtgtttatgctgattgctgtatttgtaattaaggatcccttattggagtcatttattttttctttaggaatgattgttgcttttattcctgaaggtcttttacccgctgttacgttatcacttgctttatctgttcaacgaatggctaaagataacgctttagtaaagaaactatcagccgtagaaactttaggatgtacaaatgttatctgttctgataaaactggtactttaactcaaaatgaaatgacggttaatcatctttggactcttgatagtcaaatggatgtcagcggcgaaggatatgttccaaatggaaaaatctatgttgatgaacaagaaattaccgcaaagaaaagtaatgttttaagactattattaagtggtgcggtactttgttcaaacgctaagttagtaccaccacaaaataagagtgttaatccacgttatacagttttaggtgaccctactgaagcatgtttagaagttgtagctaaaaaagctgaaattgatcttgataaattgaatagtcaatatccacgaattttagaattaccttttgaatctcgacggaagcgaatgacaacgatccatcaattaaaagactcttttgaaggcaatcagagaattgcatttgtaaaagggtctccaaaagaagttatggaattatgtaatcgttgttttaaaggcagtaaagcctgtccaatcagtgaagaagaccgcatcaatattatgaaagcaaacgatatgtatgctcgtgaagggttgcgagttttagcagtagcctatcgtactattgctcataatgataaaaaacttcctagttcaattcgcgaatatacacctgaattaattgaacaagatctaacttttttaggcttgattgcaatgcaggaccctccacgaagtgaagtcaaagaagctgtggaattatgccatagtgccggaattaaaatcgttatgattaccggagattatggtttaacagcagaaagtattgctcgcaaaattgggattattaaaagcgataccgctcgaatagtttctggaacagaattaagcaaaatgaatgatcaagaacttaaaaacgttttagaaggcgaagtggtctttgctcgaatggcaccagatcaaaaatatcgtattgtttgtgctttacaagaaatgggaaatattgtagctgtaactggtgatggtgttaatgactctccggctctaaaaaaagcggatattggtgttgctatgggaataactggtaccgatgttgctaaagaggctgctgacatgattttaacagatgataattttgcctcaattgttcgtgcaatcgaagaaggtcgtgctgtttataataatattcgtaaattcttacgttatatttttgatagcaacaccccagaagctgctgcccctgctctatatttgcttagtggcggtttagtcccaatgccccttacaatcatgcaaattttaactattgatattggaactgatatgattcctgcgcttggtttaggggcagaacatcctgaagataatattatgaatcagccacctcgtcgaatcgatgaaagattacttaataaaaaagtaattttagtaggttttatttggtatggcttgattataacgctatttgccttaggaggatatttccttgtaaactatttgaatggttggcctcataatccattggctccagaaggaactgcgctctataacgaagcaacgacgatgatgctagttggggttgttttttcacagatgggaatggtcatgaacaaccgaactgaaaaagaatcagtatttaaacgcggaatcttctccaatcattatattaatttaggattagttgtagagtttgttattttattagccgtagtctatattccttttttaaatggtatcttcaatactgcgccaattgggttaatagaatggctatatgctttgccaattccttttattgtttttggaattgaggaattaagaaagaaaatattaagaaataaagacaaataggaggatggaaacctatgaaaattataatcgttgggtgtggaaaatttggtacccgattagcaaattatttaaataatcaaaatcatgatgtcactataattgacaatcgtgaagaggcttttaataatcttggtggtaattttaccggacggacagtattgggaatggggtacgataaagatgttctagaaagtgccggaatcaaagttgctgatgctttgatcagttgttcaagcagtgatgctattaatgctgttgttagtaatattgctcataatatttaccatgttaataatgtaatcgccagaatgtatgataaatcaaaggcacggatttttcgttcaatgggaattcatacaatttcaattactgatttgggtgttgaaaggatcttagattattttgacagtaatcggcttcaagtagttaaaaaaattggtgaagacagtgaaataaaaattattaaaattaaagcatccttatctttaataggaaaaacagtcgatgaaatttctcttcatggtgagtttgaagttgtcgcaattgaacgacatgatattacaatgatgcctttaaaagatactaaaataaaagataatgatacgatttatttttctgtactagaggaatcattattaaaatttaaagaaattttgtattaagaggtgaaaaaaatgaaaataattatagtaggtggaggtcaaattggttcttatatcacaagtttactacttaaaaatgaccatgaggtccgtgttattgaaaatagaactaaagcacttgaaaactataaaaatgccggactaccagaagaatgtttagtaatcggcgatggaacagatattgaggttcttgaaaaagcaggcgttagaacttgtcaggccttagtctgtgtaactggattagatgaagtcaatttaactactgccatggtttctaaatttgaatatgacgttccacgaataattgctcgtgttaataaccctaaaaacgcctggttatttaattctggaatgggagttgatgctaaaatcaatcaagctgacattattggtcatatgattgctgatgaaatgaattatcaatcaattatgaccttaatgaaattatctaaaggtgatttttcaatcgtgcgaattcgagttgattatcaatcacgatatgccggcaaacaaatttctgaaatttctttaccaaacaatgctctcttaattgcgatttacaatgatgacgaattaatgattcctcacggagatacgctaattgaagccggacaagatattctcgcttttggcgatgagcaggcaattgaaaaattaaatgaaatatttgttagttaataattaacacaaaaacagccaattaacttttctatatagcaaactctatttactttaggaagtttctataaaagattgtttaatggctgtttttcattttgagtacagatagtgggactctatctaaatttattgatatccggaaagaatatcatgaagagtagtcatttggagaagggattgaaaaactatttaaacaatcctgactacattcattagtatagtaattaaatatcgctagattaaattataaatatctaagattaacttctaacaacggtaaattatgttagctattgataatttaatactattttttgatgattataatcaatcactgataaatcataatcatataaagactttaatgatgctgaagttattacttcctcaggaactccttgaaataagattttcccatctttcattgcaatgatttcatcactataattgattgcttgattaatatcatgatgaaccataataatcgtcatttgatattttttatttatttcttttattaaattaagtatttcaatttgatatttaacatctaaatatgtagttggctcatccagtaataaaataggtgttttttgagctaaagccattgccaaccaaacacgctgctgctgaccaccagacaaattcgctaacaaacgattttcatattcttttagattagttgttgcaatggcccaatctataatttgataatcttcctcgcttagattttgatgataacttaaatatggtaaacgtccataaccaacaattgtcttaacatctaaatccccataaatctgattcttttggtgaactactgcaacgtttttagcaaattccttgatcttatagtcccagacatttttatcatttaatgttattgttccatctttggctttataaatacgacttaaaagcattaataaagtcgatttaccactaccattaggaccaatgatcgatgtaatcttattctttttaaattttaccgaaagttcttcaataaacggtttatcttgataactaaatttaatttttttaacttccatcaacatcaatactccgtttcaataagataataaataaaggtccaccaatgatagccataataatggctgccgagatctcatagggagccataataattcttcctaccgtatccgcaactaacaaaacaattgctcctatcaatatactaattggtatcaaatgtttatgttcagttcccactaacaatcttgaaatatgaggtactagcagaccaataaagccaattaccccaactactgctacactaatactgcataataaaactgctaataatgataaaccaaagcgatatacattcacatttactcctagcgaagtaagggttcgatcttccaaccctaatagattacatgccttcgccataaataaagtaatgattattacaggagccaaataaattaataaggtcgtaacatcttgccaagtatacaaggaaatcgtacccgtagcaccacttgtgattgaagcagttgcactatttgcgagggtaacaagagcactgatcgtatagttgattgccaccccaatcaaaatgattcgagttgttttaaatccagctttccacgataaactataaataattgcaaatgttattaaacctccaaagaatgatagtaaaggagcaatcgcagatagttgaggcaaaaataaaccaactagtacactaactaaactcgccccattagcaattccaatgattcccggatcagctaacggattctttaaaacaacttgaaataaaagtccagataatgctaatgcaccacctactaacatggagatgataattcttggaaagcgaatactatatacacttgctacatcgacatcgtattcaataaataaccctttaaacaattgaacaattgaaacttgaatacttccaagatttattgcgataaaaaaacagataaataatactaatattaaaaagattataaatattcgcggatgttttttaattagttccatataaaattccttctaaattttctaagcctttttgataattaaaattagcactcatcccaaaataattattatctaaattataaacttttccattttgaactgcactgaatttactccaaatatcattttgagcaaattcggtttcaaaattcttcattacttcctctggcatcgcatgactagttctcaagataatatcaggattttgttgtaacatatcttcagcattgacattgacaaaatcctgaccattaccattaccataaacatttgttccaccagctaattttactaaatcaccaacatagctagattctgtagcgacaaggtagctgccacctggcaaacccatcaaaattaaaacccgtggacttgctgtgttttggtatttagctctaaattcaaccatataattaacaaattcatctactaatttatttgcttttttctctttacctaataagcttcctaactcctcaatacttttaaacatacctgctacacttttaagatttaagaaactagaacttacaccaattttttcatatttagaagctaaatcaccctccaatgaattagggcttaatactagcgatggttttaaagttgacaatacttccatatctggcgacattgcagttcctagttctgtcgcttttttatatttctttggtactgtataactttcagtcgtcggaatgccaattacctgatcagctggaacatccaaagcttctaaaatttccgtaacagctaccgaagttgctgcaatcgtcaaattattattatcactttttccactttgatctacacaaccaatcattgacaaagcaaggacaagaacaagaaaactattttttaacttttttaacataataatatgctccccctcctgctacgacagctataaccgctacaattccaataatcaacagcgtattattactactatcctttttttgctcactttgttttaataaattttcaactgtcaatttcttcttttcattaactttgccatttgtatcaattacatggctagataagccagaaataccatcaaataaactttcacgtgacacttcccccactgtagttaccggcgtttctaccactggttgttcttcatttgttgtcgtatcactagtttgattagaattcgtacttgtattattgctggtgctattattagtagttgaattattatttaccgaatttccattatcggcagtggctggtaccatggtactagtgtatacacctgttcccggagtaatagatccttgatttaatttaataaaaaattgcacatcacgccccattggagcgacatacatgataggactaatataatcatttaatgaattaatttgaattcgataatgatttaccgtgtcaccattagcactactacttcctgttttagtagcactaacactattaaaagaaccaccactattcatgattttaaatcttacatttgaaacatttgaagctaatcccaaaccaacagtaatataatatttaccaccagtttgctctaataacaaattgccttctacaatacttgaaaccatgctatcacctaatgtaatattagtaccaccatcttcggtgttaccagttagaggattaacgtaagacgtggagcgtccaattaagtacgctccatcgtctagggcaaaagctggtttaatattaattgtcatcgttatgatggcaaccaatattaataatactttttttatttgcataatctttttcttgttaaatatgccgcagccactaatgatgaaactaataatcctcccattaattccatattagcattatctccagttttcactgaactacttgatgttcctgtagtttggttagtcgttggagttgttgtatttggtgtatcgtttgtattattatttgattcaccatctaccttagatgcttcaattgaatcagatacaaattttaatgtgctataatcaactttcattcttgctggaatatcactattccccatcatagctacatgtggatttaccacaacatcaaataattcttcctcatttggtaaaacgaaagaccacatagttgctttaccatcagcatttttacttacaataacagctggatttgatttataatcatcagttgatgaaccaatgtataattcctctaaccatgctttaattgttcccatagtcatttctttagttgtgatatacattgttgctacaccatttttaactactactgtagcttgactgtcaattgcacccgctgccattgaagccttatcttgagtcgcattccataaagcaacatctactgtatatgtaccatctttagcaaatttgcttgtactttctggtactactagtgttggattatccaatcctaaagataatctcgcctcagaaccatgagtacttccaccatagtagaattttacatttgttaattttgtattttttgctaatgtaaattgcatttcacttacatttccattactatcacgtcctgtgatatcagctaccttataagctccagcagcttgctcaacttccattttatcaacgtatgcagtttgaccatacacagtaactgcacccatttgtaatgttactaataaagttccatcttttgaagtaaccgtagcgctcttgaccgcttgggcagccattgattgtacatcttcatttgcttttaatacatcgctagtcacagtataagtaccatcagctaatgtatattcaggtgcttctggttcttcaggaataacaatatccgctgtactatattgaatatacgcatcaactgtcgtatccatcgcgtcaacaaacatttcaatataaacaccctcactgtttaccgctacaggtattttaactttttctacttgttgctttccttgatcatcttcgcgataactaataacttcagcagcatgtttttctgattttgtatcagtttcataatattggatatttcctgcattaccaactaagcccattaaatttaatgttttaaattcagcagttaaataccactttccttcctctactgataattctccattttctgctaatgctccagctgccattgaatcatttgcaatattacttgcattcttcaattttgttggaatagtatatttaccatctggtaaatcgcttacctgggcagcatctacattacttaatgtggctatctgaattccaaatgccagcattaaaactaatactacttttaaaagttttttcattttcttcctccctctttttctttgttagaaaagactaactatttagttaaaaaatatagagaatatattctctgctaatgttagctaaaactaactacatccattattttacatacatctaatcttaaaacaactactaattttgttgcccccattgaaacaatcttttcaaaaaatatcttttttctttataaatacagcattttttgatgtttcatcgatgaaatactattttataataacgttcataattgcaatactctcaggcatatgaattttaccaaccgttggtttaacctttatctttacactcgtttgcaatatccgttcttcctttgaataatgaaaacgtaattttgaaataggaataatataatcatccttgatcatacgacattcgagatagtcttctcctacttggtattttaaagaactcagcttccctttaagaaccattttccccatcatcgattctcgttcaacttcttttggctttaaaactaatcctccatgccccatttttatatccaatattcctggatgaaagaaaccatcattagccattgatatttccatcttatcagctttataaacagtaaaagcaaacaggtattgaccatcatcaagattagcactaagcatatctccactaatttcttttacattatcaatcaattcaaataatctttctttactagtgttgttaacaagtttagcacgtgctttagatgatagtgttaaaactaatgatagtgcctcttgatacgcttcttcatcatcaaaattagctgtatattttaaccaatcagataatttattaatatcttttaaatattcccttgccattctacatccctggcatgataaaattcccttccctttttcagtcgttaacccctcctgatagaaggtattcaatactcggctaaacgttgattttgatactccgacctcttgcgctaaccgagtaactgtgtaatccatttctctttgtttatataaaaataataaatatgatagtttttcttttgttagctgcataatcccctccaaagttagtttatgctaacatattatcgtatttattcctttaaaacaagataaaatagctatattcatgatgaacatagctatttttaactacttattacttaaagatcatatgaaaaacacactgggcaattatgttctttatcaaaaataatttgcgtcttaacaccataaagttcctgaatcacttctgaagttattatatcttttgggcttccttctttaaaaactttgccttctttcatagcaatgatccaatcactataacgtgaagcatgattaatatcatgtaaaaccatgacaattgtctgttgttcttccttatttaatttactcaataattctaatacttctaattgatgaccaatatctaagtatgttgttggttcatctagtaaaattgtatttgtctgctgagcaagtaccatcgcaatccacactcgttgtttttgacccccagataaatcatgaaccaacatatcctttatctcaaaagtctgggtttctttcaaagcccactcaataatcttttgatcttctttagtcgatgatatcctcttatatggataacgaccataactaactaactcataaacacttattccttcaggggtatttagaatttgtgagagaaaacctattttctgagctatttcagctgttttcatagttttcaaatcttttccatcaagaattattttaccatcttttaatggtaatacccgagccattgtctttaacatggttgatttcccacatccgtttggtcctaaaataacggtaattttatttttaggaattacaatattttgatctttcaaaacaatctttttaccataaccggtgcttaactgtctagcttcaataattcccttcatcatgctctctccttttttaatagataaataaaatacggcactccaatcaatgataaaataatccctgttggaatttcaccagtactcatcagacttcttgataaactatcaccgataataaccataaggcttcccattaacatactgacccataatgaataacgatgattgctaccaactaaccttcttgcaatatgcggtgcgattaaacctacaaaaggaatagaacctccaaaagcaatggtaaaagctgctaaaaatccggctaaactaattaaaataattgtttgtttttttaaatcaacccccaaggttattacactttcctttcctaacgaaaaaatatttagaacatcttgatatttccacaatattactccaataatcactaatattgttattaataaagctatttttagccagtctgttcctgttagaataccagcattccataattgcacatacgaaaacttttgacgattcagctttgctgagaagaatagaattaacccttggaatcctaaattaagagctaccccacatatagtcatccgaattggatctattccacgttctttttcataaatcaaaaacattagtaaaccaatcgttattacagcaccaatcattccagctaaaggcatccaaacataatctaaaaatatatctgttccactaactaaaatatataacaaaacaaagaatgaaattcctgagtttattccaattacacccggatcagctaaatcattttgtaatactgtttgtaaaatatgtcctgccaaagccattccaccacctactaaaatggcacataacaaacgcggtaaccgaaattgaaagattactaattgtgtatatggatcaaataattcacttaattcaattttcatctgacctatcgtgaatgacaaaaagcttgatactaataaaatgattatcagaaaaatgattattctttttttctttaacattttttatttatgctcctttccataaaaaggaaaaatggaacaccaatcagtgccataattattcctagtggtgtttcataaggtggttgtagatttctagcaataagatcgataagaattaaaaagactgctccatatatcgcagacataggcaaaataatttgataatcctcctttttaactaatcgtcttaccaaataaggaacaatcaaaccaataaatccaattgacccaacaatactaactgccattcccgctaaaagcagtgccgctaaacatactagtattttacaacgaggaacgtttacccctaaaccaacagcagtttcttcactcattgaaataatcgtaatatttttcccttgcctcaaaagcaaaaatagaccagaaacaaataataatgtcgctaaaataagttcttgatatccaatattagcagttccgcctacattccaatatgttaattcttgaccaattccaaaataaattgctataaactggcttaacgaagtaaagaaaagtgagactgcaacaccagctaataataatcgtttagaattattagtatacttcccttttcccattgtcatcgttaaaaataaacctaatcctgctccgacaaaagaatacatcatcattaaaagaaaattactgcgactgaccaaagcaaagcaaattgctaacataaaagaagcacccgcattgattcctaaaattcccgaatcagctaaatgatttttagtcagtccttgcattgctgctccagccatcgcaaatgcactaccgacgattccagtcgctaaaattcgaggaaatctaagattaataataacttcataatcatttccattactctttttacctaaaatgattttaaaaaaatcttcccatcctattgtcaccgcaccaaattttaatgaaaagaaaatggtgataggtaatagacatagtcctactatcagccattttcttacttgttggttattcatacagtgctaaaatactttgagtaatgttttttaactgttcttttgttgataaaatatcttgatagatatatgcacttgaatcatatgtaattaccttttggttttttacagctggagttgagttccatacactattatttccaactaaatccataggatcttcttgccagccaccaatcattatcatatcaccggcatactcattgattgcttctaatgaaatagaacgatattgttcaccattaataatttctttttgaacaacttcgggtgcttttaattctaataaatcgtataaaacttctccaccacgaccttgtttatttccatatacaaataattctttactatatgtttccatcaaagttatcgtcttgttagatattttagcatcctgtaactgctgcttatatccagcaacttcttgattgaaatcagcaagcaattttttcccctcctctttcttatttaaaacatcagccatccaagtgattctttcggcagttgacatatttaaataatcaactagtaccgttggtgcaatcttagataaattatcataatcagcctcagaatatgtaataattaaatccggttttaattttgtcactgcttccatactatactgcccatacgcatcatcaccattaattgaaggtacatctttcaaatcttcttcaaatacagaatctttgtatacatatgtagttccaaccggctccactcctagcgcaagtgcatctccaacaaaataatctattacaacacgtttaggctcattaggaatctctatttttccttttactgtttcaactgttcttattgtatctttagtggcagctgaacaaccagttaaaataaataaacttaacactaatatagttgatagtacttttttcatttatatctcccttcttagttagttttagctaacttatgttgtgattctagcatgccttaatttcttttacaatattttcactaatattatgtatttttacatttattttatgtataatttaactggtgataattatgatatgtagaaatttgacagagtactataatattttctttaataaactagctttccaatactatcagtatgataacttttccttatatataaatcctcaacaacctgaagaattcattattcatgtgcatattgcagatatgtatgaactttttgttggtgattttactgcaccctatgatattgaaatatcatttgaaataagtgaaacatatctacagctaggaatgcttctaactggtgaaattgagtatgatttaaaagagagtcataataatcatttagagccttctagtttttatttaaatggttcaaagcgtagtggattacaagtttggaaaaaaaatcaacattatcattctacagatataatcataaaaaaagattttttcgaaaaaaaattatcggcatatggatattcctatacaacactagaaaaaattgaaaaaaataaaatatttcgaccactcccctctaaacttttacaattaatgcaagaaatatctgacactttaagaaataaagcaatctcacaactatatcttgatgctcaattaatgaagatcatctactttttgttacctcaaaataatattctatacccccaatctaaaactattacaattaaactaaaatgtggtcgaaacatcttgctaaataatgatgatcaagaaataatccagcagattcacaatgatctaactgttaactatcagcatcccccaacaattaaggagctggcaaagattcactatattagtgagcaaaaacttacagctggtttcaaatacttatatcattgtagtattcatgactatattagtaatttacgcttaaatatggctaatagtatgctgttatctgaacaatctacaattattcaaattgctaagactttaggtttttctaatgctaattcttttatctatttttaccgtaaaaaaactggtataacacctaaacaattccaattaacacaacgctaaaggggctgttttttctcaatcaaatagaaattattatcaacctcccatattatcttatataccctttttccataaaaaagtactctaacaagagtactttttaattatatttttttctagttaataataaaattattaacattgtcccacccaataaactataaccaatgatttttgaatcatcaccagtattaatactattttttattgatgaattagttgtctcgatcacattactattattttgattatttacattatcttgatttggcttgtcagtagttgaattatcagctttttgacgataatcatatgtcattaacattccatcaaactttccacgatttagattcttgaaatctccatcatttgattcactatacaccagtaatgaaatttgataatcatttaataccataatctctgaagcataatcagcttttgaaccaccaatattttcgattgttttcaaagtaccattcttttcataatttgcaataaaaacatccatacttcccttattaagacctgttacatcatagtctgttcctcttgattgaccaataaatacatattgatcttcaagttctatcgcacttatcatttcactagcttcactactcttgatcacattgacccattctgtctcaccagtttcattacattttaaaacatatgcattgtcataccctgttccaattggagcaaatgtgtcagtagttgatttagtgttacccattaaaatgaatccaccatcactagtagctaagacactattgcaataatcattgcgatcgccaccataagctttagtccacaataattcaccagtagcactaatttttgcagcaaagcagtcaaatatatctccataccagtcaacatctacaaaatcaccactttttgaagaaagactaccagcaacaataaaactgccatcacttagaatatctaatcccgaacttgaagtttcaatattttttccacctaaaactcgttgccagacttttttaccatgagcatcatatttaactatgactaagtcatataatcctcgattttgattttccatatcgccatcatttgaatttgtttctattaaaacagcaataccgccatcatccgtagctttaatttgtttaacttgatcgttggctgagccactaaaattactcatccagatcagcttactgttagagtcatatttagcaataaaagtatccatttgaccatgaacggtaccagcagtatctaactgtgcaaaatcaccggttggagccacatacaccccttcttgatatccaccactaactacaaaaccaccatcatctaggccacataccttagctgcatatgcaattgagtcgtactctgttcctcctaaagtaagagtttttaaaagttctccttttggatcatattgattaatataagctattgaaccaccttttaacagattttgaaaatcaccatcatttgagtatgattgccctacagcaacaatatttccatttttcaaaactgtcatatcatcagtataatcataatcactaccaccaatatttactttccaactagttttaaagtctggctgttctacttcaactggagcaaaatatggcggattggtagtttctaccatatctttactagagaaagataaacgtatatctcccattgctttatcgatatgtaatttgaccggtgtatctaaatcatcaacttcaagcgtaactgtttttacttgtgttacttcatcgtactcatctttcaacaccgctatcatttcaccatttttttcataactaacttcccctaatgttgaagcgctaacttgagttcccataattgttgcgttagtaaaataaattgttacagcatacttaaagccaattttttcaacatatgcatctttatataataatggtgccatcattgaaagactatcttcattagctttccaagcttctaccggcactaaatacttttcttctgcatattgctctagtgttgttcccgctaaactagctaaaaagccatcatacttaccttttaattttccttcaaacaagccactattagaatttgtattaccatagacgatatagtcatcatttgctccaggaataattccttctggattatcttttccatctccaccatagcttgaaatatttaaacaagttccatcctttgaatagtgggcaatataaatatcttctttaccgtatgtctttatccctgtaaaatcttgatcattagtatcaaaggttccaaccgctaaaaaaccatcactaatcgctaaaagataatctcctgttgtcttactattattagcaaggcttgtagtccattcaacttgtccatttgaatcaatctttaaggtaaatgcaacattattttcctcttcatttccaacaataccactatttgagttagtcgttcctgttaatacatacccattatcaatatcactgcttgatatttctgttttatcagtagatacttttttattatgagctctaattatatgattaaaaacatcatctccagttccaccaaaagcttttacccattcttttgttccattttcattaaacttaacaacaaatgcatctttaccaccatgagctaatccttcgagatctccatcactagaactcgaataaccagctgctaaataactaccatcgccatagttagcaactactgaagtaaattcatccatttttttgactgctttatcaccgccagttccaccagctcgattaatccattcaatatttaaatcttggtcaatctttacaataattgcatcgcgatcagtttcaattttattcaaaccgttcatatctaaatcagtagaatgtgaataacctgcaacaataaatccaccatcgccagctggttgaatagccttcaattcatccgcatcactacccccaacagtaacaaccttaattaaagttccatttgaatctagcttagcgattattccatcttttccccccttattaagattggctaaattactatcattagactggcttacccctactgcaacataactgccatcattagcttcagttacagcattaaaactatctgctgcactcccacctattaaagtttcccactttatttggccatttttgtcatatagcataacagcaccatcactctttcctttagcctgttcaatacctgttaccttattgccatcaaaagttcctgttgcaataatatcaccattgatcagtctttcagcatcattgactgtatctggagtaatactattattaccattatctccatacatcgtaacccaattagccacattatccgtttcaaccgcattaaccgttatcgagcacattgaaacaatcattcccaatgaaagcaccgatatgagtgctttatttaaattttttcccattttactgtccatttttcctttctctttttttagttagccttaactaacccatattaaaaatttagcacatggaatgattttgaacaattataaatttcgttgcagtaatgcaacatttattacttttagtgcaaaaaacaatgatttcattaactaatcatcgcttttcaataatgcaacaaaatataaaaaacatatcctattaaagaatatgtcttttatattattactgatttgatgaaatcaattccttcgcacaaacaataaatttctctaatgcttgattagtcactaccccttttttccaaatcaaacacgattgtgaaacaatttctggttctaatagtcggtacgttaaatttggataagcattacttttgaaaactccatcaatcgagattccatagcaaagaccactttctactaataaagctaaatttgaattaatatcataatttaaaatcgtttgtgcatttatctctttacctaaccagtttttgaaagtttctttaacttctaatcgatttgcaactccaagaactaaattagatactacgtgattttcaattgtttcatattctttcaataaatcatcttttttcattaccaagcaccatttatctaaataaggcaactccaggtattggtaatagtctttatcgattggttctaaaacaattgctacatcaattaaaccctcgttgatcttttccttattttgattactaccagccgtataaatattatatttaattttgggataacgttttgagaactcctttaaaactactggtaaaaacttatttccactcgattcaccacatcctatggtaatttctcccgaaatatcatactcactttttctaatttctgctgctgttttatcttgcaaatctagcatttccttcgcacgacgttttaaaattatgccactattagttaaagtaatttgtctactcccacgaataaacaaacgtgtgccataaatttcttctaactgctgtaattgtcttgttagcgtcggttgtgtcaagtgtagtttttgggctgctttagaaacattacctgattcaactactgccaaaaaatattctagaactcttagatccatctttatcaccactttttattatacgagttatttatctataatactattattctaaaactttttgaacgatattaactgtttttttattttttataagggtaataattaatgtaattgtacttaaactgataaatcctatagcattagcaataaataaagatggtaaagcttcagttctcataagactttggattacaatactgccataaggagagataaacacccctaaattgaatccaaccaataataatgaagtagctaacgtagtatttggaatatttgaattattaattttatcaatcaaacttggcataaaaattttaaaaccaaaccccgttaaatatccaccaacaaacgttataactaaattttgacttaatcctaaaattaccattgctaatgctaaaataattaatccaatcgatgtagtaagctgattaaaaacctttaagatttttccaaataatagtcctgcgctaattccacctaatgataataaaataattactaaactagcatcactcgctgttccatatccctcaccagtcattaaagaagcaatcttaatacccatgatcatatataacattgcagccataaaaattaatccaacataataaaccactggcaaaaagccggcacttttatggctttctttttttatttgatccccaccattagccttaatcacatcggctgtttttacctgagggacgaacttaaaataaataaagaaaacaggtattgcaatcatataagcaataaacggagcctgccaattaatctttaataactggccagcgataaaagtaatcgcaattcctcctgccccttcaaatgctgattgtaatccatacattgatgaacgctctttagcatcataaaaataattgatcatcgataccaatagtgaattaaacagaccaacaccaaatcccaacattgcacgactaatcaaaataatcataaaattatcaattaataacggtactatccctgcaatcataacaattcccagcccaatagtaattgtttgcttatacccaactcttttagcaattaaagaacttgttaaaacggaaatcatcaaaaataatgacggtaccgtcgttaacatttctaccattgataatggtacttgatcaaaatgttgtgccatggccggaatattagcattaatcgctgcagcactccccactaataatgatgctgataataaggcaaatctaagtatttttttatccataataattatcctcctttgattacactttcattataatcaattgcattactatgtctaatacttatactttatttatactattcgttttatgtatagttttatttgaaataaaaaacacatccttaaaagaatgtgttttcaacattacatattccccgacacttaattacttaagcggaatatgtatccgtcggctctttgatatcataacagatatacttagaatgtcaataagagaattagatatctaatcgtgttaactttactcatcgtctttctcagctataatttcattattaataataggagcattttctatttttttagcaatatcaagtttataagtcagattatcatggtaatttaatgaaaataaacaagcgtatagggtgtttaaaactatactgatagattctaatgatgaaaatccagcaatttttgaaaatgatttttcccttgtcgtaacacgcaaagtaaccgcagctaaatctgaaagactattattcccaatactcgtaatagctataattggacagttattttcttttaatatctgagcggtcttcacaatattagaagactcacctgaataagagatacaaatagcacattcatcaggtgaagacattgcagcatcatgaaatagattatcttgtatagggtgaatataggcttttttatgaattcgatttaatttaaatacaaattcttctccagcaaaatttagatttgacattgcaaatacccgtatctctttactttggtgtaaaattcgtactgctttttgtaatgaatcatgttggaacaaagacaaagtatctttagcactttcaatgtgtaaatttacgattttactagctattgtcataatagaatcttggttactaaacggtaaattagaatcaatattacaaaaatggctatttaaataatttgcttcttctaaataggcgtctttaaattcaacccagccttgaaaacccagcttcttcgaaattctaatcaaagttgatggtgatgtaaatgttgcatcagcaatcattttaacagaatagtctttaatattaatctgtttatctagaatataatcaataattacccgttcattatgtgaaaaggggtaggctttcatttgttcttttaacaacatcatcattacctcctaatatcttcattatatagaatgagaatattatttacaaattttaataaatattgactattaattgtgaacattatgcctaaataatatttaaatatttaatcacgttcatagctgtgatattttgattatattattaaagggggcaatttaaatgcagtatcgaggtagttacttaagttatttattaatgtatttattctattttttatcactggcgttattatcagtcctgatttctgtttatctgctagatcgtggatatagtgcttcacaagttagtctggtagtagcatcttcatacattgtttcagtaattttacagcctctagtaggctatctaaatgatcactttaacttaaaatgggtaaatagtgttgttttaattattgccgcaattttaggaatagctctaatttttgcaaaacatctttttagtattactttattgtacagtcttactttagggctctttaacagcactaaaccggttattgaaagaatggccaccttatctaaatatcaatatggaaaaattagaatctggggaacaattggatatgctattggttcacaaatcggtggtcttatatatcaatacatttcacctgaaagtatgtatttctttttttctattagcctaggaatttgtcttctaggtattatcggtactagaaacgaacataaaaattctgatattcatggtgaaacgactacacaacacctaggcttatggaataaaaactttatcgtctatttgattatagtttgcttattctatgcgataactaacctaaatacgacctatttaccagcaatgtttcagcatcaagggatttcagttgataaggtttctacaattattttattgattactatttcagaattaccaattatttattattctcatcgttttatgaataacatttcaaatcgtcatatgttaataattgtttttatcttattaatcattcagtttggtacatattgttttattccttataatatcatacatgtgattatatctatcggtactaaggctgtatcaaccgtaatctttattatgctcaatatgaaaatcgttgtttctatagttgattctgatttacagatgagtgctcttgcatgggtttctacattcaatagtttttcttcaattgttggtcaaggtcttggtggaaaaatacttgatacttattcttatactgatttttacttaattttatttttaatcgctgtaattggtctaggaatttcttacttttatcatcttccttctgggcataaatatcatcttttctaaaataatttgtaactaaaaaaagataaaaggatataatcttaaaaattatatcctttaaatttatccaaatagacgactctagtttcattaagaaacacaaaatattatttatcaaaatcaaacatttcaaagacatcagaaactggtaaacagttttcaatgttttcgattgttttagcaagtaaacctgctacagaaactgtctttaatttagggaacattttatcttcaggtaatttgattgtatctgttacaacaacttcatcagcagatgaattttgtaatctttcaactgcaggtccagagaatactgggtgcgtacaagcaacatgaactgatttagcacctttttcttttaacatctcaataccagcaacaatagttcctccagtatcgatcatgtcatcaaccataatacagttcttcccggatacatcccctaaaacacccatgatttcagccacgtttggtttaggtcttcttttatcaataattgcaactggggcatctaaagctactgctaatttacgagctctagtggcaccaccatggtcaggagaaaccacgcaaatatcttccatatctttcttcttaaagtagtttgagataagtggcaatgcctgcatttcatcaactggaatatcaaagaacccttgaatttgagctgcatgcaagtcaactgttacaactctagttacaccagctacagttaataagtcagctactaatttagacgtaattggttgtcttggtttagccttacgatcttgacgagcatatccaaaatatggaatgattgctgtaatttctttagcagaagctctttttaaagcatcagctaaaactaagatttccattaagttttcagtgaccggattagaagtagattggacaataaagacatccttaccacgtactgattcatcaatttcaactaagatttctccatcagcaaaatgatgcactttactttttcctacttttgttcctaatttttctgcgatatcgttagctaattcaccactagctgataatgcaaagacagttattttatttttcattttcttctcctattttcctttttgatttcttttttcttctaatactttggcatatccatctttattaacttggcgagcccgagcaattgcaaaagcggaatcttcaacttgatctgtaatagttgagcccgctgcaacataggcattagcaccgaccgttactggagcaactaaattactattacatccaatgaaggcattgtcaccaataatagtttggaatttatttttaccgtcataatttgaagtaattgttccacatcccatgtttacattacttccgacagctgcatcaccaacataagttaaatgtgatgctttacttccttttccaaagactgcttttttcatttcaacgaagttacccatatgagcatcttctaaaatatggcagttagttcttagacgagcaaatggtccaatatctacaccattttcgataatcgaatcagagataactgagaatttaatttcaacattatccttaatttcaacattatcaaattcgcaataaggcccaatatggcaattgctgccaatacttgacttacctttaataatacatcctggttcgattgtcgtatcagcaccaatcgttacatcaactccaatataagtattattaatatcaataatgttaacaccatttaataaatgttgtttatttatttttaattgtaatgatttagttgcttccgcaagttcaacccgatcgttgattcccccaacttcagctaaatcagcaattttatatccaccgactttaagtttatcattattcatgatttctattacatcagtgatataatattcattttgagcattatcattagttactttttctaacgcttcaaatactgcaatgttatcaaaacaatattctccgcagttcatctcactaatttgaacttgctctggagtacagtctttaaattcgacaatccccgttacttgatcattatttctaattacacgaccaaattttttatctaaatcacaatcacatgtcatgatcgttccctttaattggttatcgttatgataagcaattaaatcttttaatgtttcactagtaattagtggagcatcaccatttaacaccacagttgttcctgctttacctgccaaagcatctttacattgcattaatgcatgtccagttcctaactgttctttctgataaataatatttaccccgtctaacagtttttcaacttcttctgctttgtgaccaacaattacgtagatttcatcaacaccaacttgtttcaattcatcaacaatatgattgatcatcggcttgtataaaacctcatggacaacctttggtttatctgacttcattctggtacctttaccagccgccataactaccgcataagttttcattttcacacctcttcattaacaacaacataataacaaaaaatttacatttgttaaaggaaaaaaagataaaatatgtcgtaaaattgaaaagaaattgatttaatcaatttcctcatcattcaatatttctgttttccttacaaaataatattttcccttaaaatacttcattcccttttctaaaataatattattacgtgtcaagccaaaaacacacgatccacttccagacattaaagctccatcaaatccaattttcatcatttcctctttaatcttagcaatctctggtaccatcttgattgacggctcttctaaagtattttgaagattatcgatgactatttgataattaccatcttcaattcctgtcgccattaatcgacagtcttgatggctagctttacttaaatctaaactagtgaatgattttttcgttgatacccctcgtttaggtttaactaataatactttacattcaaaagaattctttataaattctaatttttcaccaacaccactaactaaagcaattttttgataaatacaaaaaggaatatctgccccaacttcttttcctaatgcagccatttcctcattgctcagatttaaataaaataatttattcattgctttaattaccgccgcaccatcagcacttcctcccgctaaaccagcttgagtaggaatatgcttataaacaaagatcttaaccccttttttgatgttataacgttctttcattaaagcaacaaccttatacataatatttcgttcatccgtgggcatgattttgctatttgaatcaatttcaattccgctagcaatagtattaatatagattaaatcatgtaaagtaattggagccatgatcatttctaattcatgatatccatcttctctttttccgattacatcaagtgctaaatttatttttgcgtatgcttttactttcattacttcacctacttgtcggatatatttttcgtgctactcctcttgtgtcgatccctccaacgcctaaatgcttatttgaagttttagccacaattttctctaagtcaacataatttttgatactcgcattagcaatctgacttactacaaaaaccggatcaagcgcatgaatattttttctgcttggactagaagcaaaattagctccactagctaataaaagctcatagtacgattgacacgctccagcaaaaataatcaaactatctttgtcatcctcatacaaacgtgctcgacgaattgcttctacaaaatctttagtatgcaaataactattaatatctttgcgattaccatttttcttcattgcatcatgaccggttatcaccaataaattagggcgatgtttttctaataaaggaataatttgatctttaatttcattttctttcataaaatagccatgaacattgatattaaattcttcatattttttcaaacacatgtcaagataatgtttatctccatcaatatgcagcacactaccttttaaacatggtcgactttctactattatatcacttttctcactactaaaatcacttaattccaaatcactctcatcactatcagctactaaccgatattcaattccagtcaaataataaacatcatcttgaatatcggtaattttaaaacagatatctttgccatatttttttcgacagacaatatcaccaattttcatttatatcaccatgatattatatgtaattaaatcattttggtgatatttttaaaatccgctaattctaattcttcacttctttttcgattttcaattcccgtctgcaataaaatttcttcagcttcctcataactttgctttaaattatttaaaatcgtttttcgtcgctgtttaaaacaaatatttaatacttcatataatttcaaatccggtgctttttttaactcaatttttaaaattgctgaatcaacatgcggagcaggcataaatacatttttattaacagtaaataagtattcaattgtccccatatctttaatcatcaataataatggatttttataaatacccgtcatttttaaagctacttctttttgaaccataacaatcatttcatcgattccaaaatttcctaacacaactttttcaattattgccgttgtaatataatatggaagattagcaactaaacatactttttgatatctttgctttaactgatcaacgatcggtttaatatcctgttccataaaatcaccaaagataatttcaatattatcttgatttaaaaactcctgatacacgggcataaaacgctcatcaatttcaaaactagtaacttttccactataacgccctaatacttgtgttaatgcgccaattcccggtcctacttcaataaccgccgttgtttgatcaatctttgcactagtcacgatcttatttattatatttacatcaattaaaaaattttgaccatatttctttaacgcattcaaatgatatttttctaaaatatattttgttgtcgagggagttgcgatttccttcattactgattcaccttgattttaaaaatctttcctgttcttttaaattcaccattatcacttagtgtttgatacgacccaatctcctcacccaaacgttgataaagactaaatgctttagaatgtgatgactttaaatacaaatcttctttatcttgataatgaggaataattacatttcttaaccaataattcccatttcctcgtgcctttggtgaaatatggaaataattaagaacaattgcattagccccttgttcaaagactggtttatcaaaatattttgaagaatcaatattccccgttgttaccatcgctaaaccaacacattgatcatacttatacataacatgataatcaacattaacattagggtcatcttttaaaatatgtactagctgattacaatgatatacttcatcatagtcatcataaaaatcacgatacttcacttttaaattatcaataatcgggactagatattcccctttaaattcattacttactttaaatgtataaccattatgtttacctagatccatcatttaacctccctaacacctgttctttagtgattccaaccatatttaatcgtttaaaaagtgttttgacattcccataacccaaattaaatgcctcatacaccatcaatcttctttgcttattaccaataatatctaaagcaacaaattcactccaagtaatgctttctcgattaacatcaaaagaaactacattttctaatgcttctatcacagcttctttattagcttcagcaatacctaatttcttcttacctctagcatcctttttagcaacaaaagcatgttgacagttagggacaactgcttgaatttgatcacgaatttttttccctggaaaatcagggtctgtcaaaacaataattcctcgacttttacttgcttcttgaattaattctaatgtttgttgatccaatgctaatccgtgtgtctcaatcgtatctacttcaaataattcttttaataaggctgtgtctgttttaccttcaacaacgactatttctttaatttttttcataatttcacctaactctaattataacgatatttcacttaaaataaaaggtataatcttggggctacccataataacgattttatctaaccaatataaatcaacaccataatattctttttatacaattaattaaataatcagaaggacaattcaatgaaaggattaactaatagttaaagaaaatggttctagattactttttgtgcaaatagcattaaggcagttcgttaccgaatcctgcatagtgtctttggtgctttagatactcgagacgccacagaaacttacgtaatattatctggttgaaaaaacaaactatcgatccctagtgatattttaataattccccaatcacaatacaatatccttttcaaattattaaagctactgtttttaattgtacagcaataatgagttatattatcataaaaagctaatcactatgttaaatacaatcatgacaatacttcaagctaaaggttaacataccaaagaacattgcatttgagttcaaaaattagcaatgaaagttgctcatgagttaaatatgtctgataccagattaaataatttcttccatacttcacaatattgaaaaattaatattcctacaagtattctgcttaaaacaggtcctttaacaactgctgaaaaaaatcataaatactctctagaatcctataaaatgatcaatgatatttttggtaaagaaattggtcaaatggttttacagtaccatgaacagagcaacgactcagattacccatttctatcttgattgtatcaacgctttgatcaagtcttaaaaagataaaattatctaattgacatcatgataaaattacgttatgcttgatgtgcaaacttaataaaccgcttaaataataagctatagcttttccacgtttctgagttataaacgggaggttatagcttttttttgcgaaggaaggagaacttatgaatcaagaatatgatatgatggctcacaagcccatcttcccattattaatgaaaatggcaattcccccgatgatttcaatgttaattcaatcaatgtacaatattattgatagtatttttgttgctaaattgggagaggaagcattaaccgccttatcattagcatttccacttcaaaacctgtcattagctttttcagtaggtctcggggtagcaattaacgcattgattgctaaaagtttaggtgccagtgatgaaaaacaagctaattatattagtgatcatgggatttttttagctattcttcactctttattatttgtttttattggtatctttttaatgaaaccgttctttttgatgtttactactaacccaactgttttagattatgcaattacatacgggtcaatcgtgattacctttacctttggttctattattcatattactattgaaaaaatgtttcaagctactgggaatatgatgattccaatgtttttacaaggaattggagcaattgtcaatattatcctcgaccctattttaatttttggaataaacggttacttagagtttggggttgctggagctgcaattgcgacaatcatcggtcagatgactgcctgtttactagcaattatcttatttagaaaaacttcacgtatcaaagtatctttaaaaaattttaaaccaaatgcacaaattattaaaaatatctattcaattgcaatcccatcaggggtgatgacatcattaccatctatcttagttgctttacttaatagtttgttagcgacagtatcacaaacggcaatcgctttctttgggatatatttcaagcttcaatcatttatttacatgccagctaatggattgattcagggaatgcgaccattaattagttataattatggagctaggcattttgatcgtgttaaaaagattatcaaagtttcaattatctctactgcggtgatcttatgttgtggaacaattatttttatgggattgccagaattagtcctatcatggtttaatgcaactgaacaattattagaaattggtattattggtcttcgagtgatttcaccatgttttattctttctacaatgggagtcgttatctccggagtttttgaatctttaggtaagggacgtcaatcattgacgatttcactattgcgacaatttattattactttacctttagcctatattttattgaaagtaatagggcttaatggaatttggctttcatttgttattgccgaaggaattgccagtgtcattgcagtaatcttaataaaaaaagaacttcataactttaaggtggattaacgatccacctttttaataaatatccactggctaagccggtggttttacatttgcgggcatagccctgctctcagagcgcatgtctcaagacattccttatgcctacggctaccgcgtgcactctgtatttatttagtttttcccttttccttttttaaacgggtcttccaaatccagtgtcagctgttcaatttcctgatcttcttttaattgattcgctatataattttttattcttttcgtattctttcctactgtatctacataatatcctcgacaccagaactctctatgtctgtacttatatcttgcatttgcccatctttcatatatcatttgactgctctttccctttaaaaaccccataaaccctgaaacactatatttgggcggtatttctactaacatatgtacatgatctatgcatacttccgcttctattatatttacgcctttccattcacataattgtcttagtattgctcctacctctaccctttttgcttcataaaatgctcttcttctatattttggtgcaaatacaatatgatatttgcaactccattttgtgtgtgataaactatgtaagtcatctgaatactgtttattcatttgtcatttcctcagtgatatcttatttttgcagttggtagccgcatttatattatatcacgtgaggtttttcattatcactccgctaaagctttttgagacccccagcctagctggggggttattgcagacaaaaaatgaagatgattatttatcatcttcatcaaattcttgataatcgacatcaattatatcatcactaccacgacgatactcttcttggctataataagcctttttcttttcttcagtttttctttgaaattctttgttatattcttctaactgtttagtataaagatatctttttatcgctgaccaaacaactaatatcgcaataattatccaaacaatcggattagtaagtagatttaaaatcaaacttaagataacaataatgattaaaattatcaaaatcacataatacagtggcatcaaatcaactcctttatatatagatataatacacgtttatcatttaaaatcaaataattcttttaggtttaccgcaaaaccattagctattttttcaattgatttcaatgaaacatttcttgttccacgttcaacatctgatatatagttctttgataacccgcaacgaaaagccaattcttcttgagaaatattttgcttcaagcgcaattctttaatacgatgaccaaacttaacttcaattttatccattttaatcactctccatttggatcaatcgtttagcctcttcacttattttcttaaatcgatgatgcaagccggacttacttattgtttgtccagtttcttcataataaacttcagtcagctcatttaatgttaattcaggatatttttttctaattaaagcaacagcacgtgttttttcatcaagcatgtctaaaccaagaaacatatctaccgtctcaatatcttctaattgtttatttgctgttgccattgatttcatttcattagcaatatcacaattattccagcgatttacagtatttgacatgctgcgatcaattcgagtactttcaaaattcattactgactggctcgctccgattgcccgtaaaaaatcaccaatcttttctgaagactttaaataaactacatacttattacgacgtttaataatctttgcatttaactcaaaccgattaattaaatcagcaataaactgagcaaattcttcttcattaaaactcatttctaaatgataatttgatgtttcaggattattaacacttccacatgataaaaatgcccctgctaaataagctcttgtacaacattccttttcaataatcttgggattaggaatctgattaaaccccaaaccatccatcaatgataaatcatctaaaatttcccttgctttagtaacctttaaaatataaacattatttttctttagtttcatttttcttgaaacaagaaattcgatctgaggatcatactcttcttttaacattttatgtatttttgatgcaatcttagcattctctgttctaatcgttaaagaaagaccatgatttgatagcgataatgtcccattgatcttaattactgcacataacattgctctttgacaacatgattcaaaatcattaaaaactacttcttctttgacaactcttgaaaaagataccatcttaatccttaatgatctgcatcacggtgtaaccgatgaacttgataaactttactgtagtgatcagcaaaataattagttaacgaaactgaacgatgttgtcctccagtacagccaattccaataattaaatgcatcttaccttctttttcatattcttttaataaataatcaaataaaacagtcatcttttcaataaagacttttgtttcctctttatcaattacataatcataaacagcttgatcatttcctgttaaatgacgtaattcttcaatgtaaaaagggtttggtaagaatctgacatcaaataataaatctgcatctttgggtaccccatgtttatatccaaatgattcaaaggttattctaaatgggtcaattttccctttactaaaataatcttctaataaattttggaatcttgctccttttaattttgttgtatcaattactaaatgtgctaatcgtgaaatcggctctgctaaacgtcgttcaaactctattgcttcaattaaagaagacgctttatttgaaatcaacaaaggatgagaccttcttgtttctttatatcttttaactagaacttcatcatcacaatctaaaaatacgacagttagatgaatccaatctaaatttgataataatctaattgctttaagtgcatcatccaaacttactgccatcgctactctttggtatttgggattatcctgcactaattccgcaaattcagtcaataaggcaaccggataattatcaatacaacggtatgccagattttcaaaacaggccatcgcgctagtcttccctgcacctgacatcccagttacaattactatttctacttgatccataatcttcacttctctttctatgaacattttaccaaaaatacactgataagtgtactttatttaaaaagttttaacaataattatcgacatttttgcaagtatatttatgctttgtaactcatatatataattatttgaactgatactaattttaagaaatattaatagtcgaaagatgtagttatatgatacaatttaattaaatacagaggggtgaggctatggataaaaaggataagatcgacactttaattgatcaatacttaaatttttaccagcatggcagccaagcaatcgaaccgcagcaaagtactgattttgacagcttaatgaaccagtacaagtctaaatttgataaacaaatcgctaatgagcaaaaagcaatcagagaaaaagaagaagcacgagttcttcaaaaaaaacaggaagcgaaactacaaagtcaaaaaagaaagacccaagaacaacaaaacaagttgcgtaaagagaaattgcgtaatcattccaaaaaaactacggcagaagttaaacaagccgcaaaaaaataccagcaccaaagtcgtgattatgataaaagcagtaatcataaaaggctaattgttttaattataatagttgtcgtctttgggttaatttattttattgcctctaatcaagataatgaatctactaataatacctatttatataataatttaaattatctagtcaatgatgccgttttgcaagaacctagttcaaacgatttgagctatctggataatattgaaaataatgaaaattacaatgttgctatcacatatttaaattatgttgaagatggcttaaattatcttgatttaattagtgttacaagaggtaatgatgatttattagaaatcaggaatgattctgagtattatttgtatatcaagtatcttgacaatggctatacaaataatgttttaatcgttcctaatgatacttattattgctccattatcgatgaggaagaattaactatagagactattgcattttataattttgaagatccggcattagatgtcttcactaatttatcagatattgatatctatatgaatgttgatagtattgattttttagaaacaaatgcggaaattttatttaaacattattattatcaagcttatttaaaactgccatatgatgacattatggtcatcaaagaaagagattctaataagggatattatggttaccttgattatacaaatcgccaaatcaaagtatattactctgataattatactcacgatgtaaccattgaaaatattcaaaattatcaaagtgattatcttaaaaccataacactttagaaaaggggagaaaaaatgatttcagataatttctttacagaacacatgactattgttattgctgtagctattgttctactatttattattattttattgacatgctggaaaagagttcctgctgacaaagctttagttatcaccggattaaagaaacgtgttctaacgggtaaagggggtattcaagtaccatttcttgaaacatcttgtatcatttcattagaagctgtttcaatgaccactgatatcactgaagcaccttcaaaacaaggaatttttgttgatattgctggtactgcagttgttaaagttgacaataatccagagaaagtattaatcgcagtcgagcaattttgcagtggtaatgctgatcgtactactcaaaatattaaaactgtagttgaacaaatcttggaaggtaaacttcggggaattgtttctacattaaccgtagaacaaattaatgaagatcgtgtcgcattcgaaaactcaattgaagacagtattacacgagaattagataacatgggattacgtttgttatcatatacagtattaaaaattgctactcaagggggatatttagaaaaccgggcaatccctcaaatcgcccaatcaaaagcagatgctgatattgctagcgctgaaagagcaagagataccgaagttaaaactgctgctgcagtacgcgaggggcaaaaagctaagttagaagctgaagctgaaattgctcaaagtgatcgtgataaaacaattcgaatggaacaatatcgtgccgaacaagataaaatcaaagccaatgccgatgtttcatacaagcttcaagaaattgaaaataataaaatcgttgctgatcgtaatgttgaattagcaaaaaaagaagcacaagtagttgaagaacaattagtggcatctgtaaaaaaaccagctgacgctaaaaaatatgaaactgaggttcaagctgaagcaaataaaataaaatcgattaaagaagccgaagctcgagctcaagcattaaaaatcgaagctcaggcacgcgctgacgccaaattattagaagctaaagctgaagccgaagctattcgagcacaaggggaagctgaagccgaagctttaaaagctaagggaattgccgaagccgaggccaaagaccgtttagccgaagccatggaaaaatatggtgaggccgcaatgatgtcaatggtagttgaacgtctcccagaaattatggcacaaattgccaaaccaatggaacaaatcgacaagattactgttattgataacggtagcggtgatggcggaagtaaagttagtaaaattgttagtgatgttgctgctaatgggtttgaagttttaaaagatctaactggtgccgatttaggtgaagttgttcgtactatcgctaataaaaacagtgataataaacctaaaactaaataaacttaattattcctctttaatgagcatttgcttgttaaagaggtctttttatgaaaacagtgaaacactgctattaaatcagtgtttcactgtacctttattaaaccttcctgctagtttttcaagcatactttttgaaataccaaatttaccacataaaaaatcctcgatttcttctggacttttccctgctaaatcattttcatctattcccattgatgacattatactcttaactcggttgaacatctcactatcaccttgttgatacttattcatcatatcattataaaactgctgagcattatctatcttttgttcttcttcaatatttttttgattaaattgattttgacattctaataaaccatcaatttcatcactatctaaccctaatacatcaaaaaattcaagtgctcgattacaaatattttctaattcatattgataatcttcatcagctaattgctgaaccatctctaattccttataaaactctttgatactattgttttgagttggagttaatacaatatcttcatattcatcattttcaagatcatttaatacaatcctcgtataatactctactttttcatgagtatccatgatcatctctatttcaataccagtaatttttgataacattgtaacgaatacttcagggtcgattatctggttactaaaagtatatgttatctcctctaatttgataatagctttgattattgaatcattacgatgtttttccaatcctaaagaaataatcttttgatattcaattatcccagcctgaccaaacttaaaatatatttgtgctggagtgatgatcattcctcggctgccatcttgttctttggtagcatcaataaatgcaaggatttcaaaaacattataatcaccaaaagtataaattgcattactaatttgattaggaagattctgatttgaataaaaagaaccattaattacaagactatcattaatataacttaatatttcttcttgactcatttttcttacctcttttcatactgctaccattttactaaaataaaaagctattttcaatcgaaatagccctatctaaactaaactctttattactgccctgatttctttaactcgtttagcttcgaattctggatatgttttaaaccagcgccgattcaatggtgaaggatgcggaagaacatatgcaggtttcccattaaaaacttgatcattaaaaatcaaatcaacaaagttttgattaggaaatattttcttagctgcataactaccaatgatgatataaatttggttatcaactatgtcaatttcttgccttaaccacttttcactacagcattttggcggcaaacgatccccaccgcttttagatttaccaggataacagtgagccaaagaagcaatatagaaattattttgatcataaaatgtttcatcatctatatcataccacttctcacgaagttttttcccacttaaatcattaaatggttttaaagtattgtggacatttaatgaaggggcttgactaatctgcatgatcttagcattaggtttgccccagacaacaggatgaggttcatatccaaattgtctttgacaatagcgacactcttgtattttttgttttaactctccaaaatctttcatctaatcattcctttgtatatattttaacctaattattcccaaaaagaaaagattactaactatatagcaaccttttctaatccaaaacgtcttgaaatttcttttgttagtagtgctacaacttgtttatcctctaataatactggggttaactgtcctttaacattttctattgccttcaaaatgtcattttgataatgatatcctggcaacaatacaaaaggaatgatttgttcatattcacctattattttagtattaaacgcacatactgaaccatacctactaagaatatcaaatagtttactattactccgtggatgaattataaataagcgttttactttattagaataaagttgttctaaaagaatctcactgttaaaaagtggtgctgctacttcttttggtgaacacattttagatattttatcatagatctttccatatgaaatgaccattggctgaatctgccattttatttttaacatcattaatatttttaatttatcttgaaaatctatttcctttaaacatagagacatcgcagatacttgttcagcaaagtaatcaatcacattcatacactgtgctgtaaaaattaatagacgtccttctttttctaaaataaacattagtaacatatctaattctgttttttcaaaatacatcagctgcttaaaaaactgttttcgatcatgtttatttaccaaattatttaaaagaaccagcctacgaatattacttaaagcagataaataatcatcatattgttctaattcataagctaattttttagtaaaagctggatactgcccctttgttgatatacctaaaagcagattttccgtttctactaccttcatggcctttaaagatgccatacttgaagtagcacaaatctgaatatcttcaaaagtagtaattaatttattggtgaaaatagcgtcaataaactttgacaatcggcagtactcttatttcacctattttaaagaaattaaaagataaatatcaagatattacttttcaagtttatattgataatactaatgttattgaagaaaaattattaaataatactttagatattgctttagttgaaggtacgatcatcaatcaagatttaattgtcgaacccgttatcaaagatcgagttgtttttgtttgtgcccaagattaccctctaaataacgttaaagtaatgagcctaactgaattgagtttacatccttttattgatcgtgaacaaggtagtgggacaagaaatcaacttgatgaatgcttaaaaaataataatatttttttggagcctgcttggcaatgtcatagttgggaatctgttaaacaggcagttttaaatggtcatggtatcgccttaatgcctatgaaaattattgaaaatgaagttattgaaaaaagtattcaagttattaatgtcaataacatcagtattgaacgcgatttttcaatttgttatcataaaaataaaagtataaataaaaaaatgcaagcctttattaagacctgcaaaaattattaattatttaagccttgaccaacttgttgaccaacaattgcaccatcattggtagctgtcacaacttggcgaagtactttttgacgaacatcaccagcagcataaatacctttgacagatgtttccatcaattcatttgtaatgatatagccacgctcatcagtaattcctaagtctttaacaaaatcagtaattggatctaatcctacaaatggaaagacacccttaactgctaattcactaacttcaccagtcttactatcttctaatgcaatcgccgcaaccttattatcttttgcaataagatgatgaggtttttttagaaaatgaatttcaattttatcattagcttgaacatgatcttgaattattttatcagctctaaaaacatcccgccgaacaattaaatgtacttttttagcaaatttagttaaataaatagcttcttctaatgccgaattaccaccaccaacaactgctacttcatcacctttaaaaaatggtccatcacaaacagcacaataagaaacaccatgcccggttaattcttcttccatcggaattcccattttacgttccttagttccagtagcaatcaagatattttttgcttcatatgactgatccgttgttataacttctttataatcaccgtaatcaattactttagttacttcaccatatgcctgttcaccgccaaatgataatgcatgttcatacatttcataagctaactcagggccagtcttctttttttgtccaggccagttttcgatttcagcactgacattcaactttcctccaggtgctccagcatccagcatcaacacctctgcccctgccctagttgcatataaacatgcacttaatccagcaggaccagctccaataataattaaatctttcatcttaacacgctccttctatatatggaatgatttccttcatctcgtcgatcattaaatctggttctaattctaataaatgttgataacctttaggtgaccattttacaccaattgttttaataccagcatttttcccagcctgaatatcagttatattatcaccgatatatacagcttttttaacacccaataattccattgccttgactattccttctggatccggcttagtgaccttaacatcgtctaatccaattactacatcaaaatatttttttaaatcaaaagtattgagtcctacatcagcagcaacttttaatttagtcgtaacgattcctaaaggataacctctattttttaaatattctaatgtttctactactgtcggataaacatagacaaaatcctcgtgatgactatggttataactatgataataattcaacaattcattaaacatttcatctggaaagtacttcgaaaacgtttcttttaaagatggtcctaaaaaagataataattcatcttcactcaaagtatacccaggctgatacttttcaaatactttaataaaagttcttttaattaattcatctgtatataaaactgttccatctaaatcaaatattattgctgtatccataaaatctcctttacacatcatagtatatcacacgtaattaaatgtgataaagattatgctttattatttatgaatataagtctatacttatgacgaggtgattaaaatgaaaattgcaattgtatttgatagtcatacaggtaataccaaaaaagtagctaatgtaattaaagaagcttgtattaacgaagaggttgtttacttcggtgaacctcaaacattcagtgacgcagatctgatttttattggaagctggaccgataagggtaactgtagtcaaaagattcaaaattttattactactctttcaaatgaaaaaatcgctttttttgcaacagctggatttggtggttctactgaatactatgataaactggcagaacgatttgataatgttgtaaatactaataataagatattaggacactttttctgtcccggtaagatgcctttatcaatacgtgatcgctatgttaaaatgattcaagagcatcctgaagataaacagcttcaagttagtattgataactttgatgcagctctatcacatccagatacaaatgatttagaaaatgctaaaaaatatgcattagagatgatagctaaggtttaaatatcttagctattttatatattaaaataaatgaattggattaataaaattaatttttttatgttattataatataaaaggagtggtaggatgttgaatggaaaagaattattagataataatacgcatataatttatgaaaaaattactactgatgaacttccgctaaaagttattgaggtaactttagctaaagatgatcctaatttaatccctccaaaacattggcatcgtagtttagagtttattattccacttaccgcatcaattgaactttggagtaatggggaaacttattcaattgctcgtaatggtttagctatcattaattcacaagctatacatacgactaaaattattgaatcagagtattgttttaaaagtattgttattcaaattaagtatgattttctaaaaaaatgctatcctgcatttgataatatctatttttctaatcatatagtcccagaaattgaacaaaaactggtcgttcttttaactaattagagtttagagtatcaacaaactactgaatttaaattacttactattaatggttatttatatttaattattagtattttattaaagtatcaaaaaaagattagaaaagttggttactttcttcaatctgatcaaaaactccaagaatttatgaaaattctcttttatttagatgaacattattctcaagcactagatgtttcctcaatcgcgaaccaatttaacttctcttatggttatttagcaagattgttcaaaaaacacttaaatattacggtcaaacaatacttaactgcacaacgtttagaacactgtactaacgatttgattcatactaatttaaccattactgagattgcgatgaaaaatggcttctctagtactaaatcttttaatcgtgaatttaaactcaaatatcatgaaacaccccaagtatatcgtaataaagttagaaaatgaccctaatgtggccatttttttcatatttaaattttataaataagcttaagatataggcaaggtgaaaggagaagagagaatgaaaagattatcaaaattattacttgccttatttattgcttgtagcattaccggatgttctcaaagcacagaagttgttgatgcaacttatgaaatttatattgccggatatgattggggatgtggtgtcaataaaactattttgacattagacaaagctgttgatgatgttgacaaaaatgattttatggtatctgaaacaaaacaagtaactgattgggaagatgaggcactcccagttgttgaaaaaactttggagcgtgttgttgatgatgcctattcttgtgataaagatgggcaaaaaattgatggagagtctaaatatattgcgattgagttatatgtaagcccaaatgatggttcgccattattatactctgctacaacacattataatacatggagtaatccgtattatttaaatatttcattagcaaaaaacggtgaaataacggtagacgataaaaaagttactaaacttgatgttagtacagaatatactaaaaaaattactgctgctgacgctttagaattagaaaaatttaaggctagtgatggaattgaattaaattatggtcattttaaccctaaagaaccttctaatacattatttgtgtggttacatggttctggtgaagggggaacagaggatactaatccacaagtaacctctttatcaaataaagtaagtgcttattttaatgatgatttccaaaatgctgttggcaatgcatatgttttagttcctcaatgtccaactttttggatggatgctgatggtaatggcggtgaatggaatgatgacttattagtaactcatggtccttcttattatactaatgcacttatggaattaattaaagattatcagtctcgatgcggagctactaaagtcgttcttgcaggatgttctgcaggtggatatatgactatgcgtttaattttagattatccagattattttgctgcagcaataccaatttgtgaagccatgcctgatgatgttattagtgaccaacaactttctgaaattaaagatctacctctatattttatttattctaatgatgatcctagtattattccagaaaaatttgaaattcctactattaaccgattaaaaaatcttggtgcaactaatctacacgttgccacatttgattcggtcatcgatacttctggtaaatataatgatttaaatgatggtgacccataccaatataatggtcactggtcatggatctattttgataataatgaagccgactgtgatgaacatggtgaaaaagtttggcaatggattggtgaacaagttaaataaaatgaatataaaagatgtaacggataaatttttaaacgttacatcttttaattataattttcagttaagttgacaattatagggttcctcatttaaatatttttattgctaaaaagtctttctagttcccctatttttttagtcttttgaaatatgaatattagataaatctaaatactcctgcttattggaaagaaatcctgatttaactgaaacaaaaccttttaaaatatcatgggcaaattcctctctgccactactgatacctgttttaaacatctaattaatattctaaaatcattttcttattccagtattaattaaccgattgatgtcatttaattatttaacacttccgccatggaataaacactcgtatactttaatattattatagtatatttcctctttaccattaaaaaattcataatcaccatcataactacaatgatatgtataattaccattagtatacaacgccggacctctaaaaggagaaattcgatcaactaataatagtgcttccttcaaaaaatcaccactaaaagcctcatcaagcactttaccataataattcattacataaagtggaatattgtctttatagacacattcttcaccaccaaaaaattcactgcctacaaacgtatcaatatataaatattcattttcttgatattgataatcatggctgttaggtcgactggaaacagttttcccctcctttttagcataggttgctttttttgcctttaacataaaatcaatccagttataattactaattttactttctatttcctgcttagcacagtcattatccttaactaagttatcaatcgttatcccaaatatcactgataatcccatgatataatcgagatttggcagcacactaccactctcccatttagttactgtttggcgacttacttcaagcagatcagcaagctcctcttgtgttaatcctttacgtttacgatataaaataattttatctccaatcattttccatcctcctttattttagtatcattttactatatatttaaaaattttcgagaaactataatttacatttttagcaactattattgtcatcttcaaaatataaggaaataatagtaattatgttgtacaataaattggggtgataacatgaaaaaaattaatataacagaaattaaaggcattcaaatcggccaagtcgaaaatcaaaaagctggaaccggctgcactgtaatcatctgcaaagatggtgctacagctggtgttgatgtaagaggtggcggcccagcaactagagaaacagacctgctaaatccaatcaacatggtccaacagatcaatgctgtaatgctaagtggcggcagtgcctttggactagatgcggctagtggtgtaatgcaatatttagaagaacataactgtggttttgatatgaaggtcgcccatgtccctattgtttgtggtgcatctttatttgatttaacagttggtgatcctaaaattcgtccagataaagcaatgggatatcaagcttgccttaatagcgaaaaaaatgaaccgcttaaagagggtaactatggtgccggatgtggtgctagtgttggtaaaatcatgggtccacaatatgcaatgaaaggcggcttaggtactgcagccatccagatcgataatcttcaagttggagcaattgtagcagttaatgcctgtggaaatattgttgactataaaactaatgaacagttagctggaatttatgattcagaacacaacagtatcattcctgcagacgaggtgatttttcaacaaattgaaaaacttcgccaattaccaagtggtaatactaccattggttgtattattacaaatgccaaattagacaaagctcaatgtacaaagattgcagggattgcccacaacggttatgcccgtgctattcagcctgtccacacgatgagtgatggcgatactatttttgtattaagtactaatgaagttgaagtaatgccagatgccattgggattcttgcaactgatttaatggctaaagcagtcaatcgtgcggtaaaaaaagccgacagcgcctacggtttaaaatcatacaaagaattacataaataattattattacagttggcagcaataataaattgtactataatcttatcgtcaaaccgtatcaagaagatattttcaagagatcatcatgactcttagaaaaatgggaagatatggcgagacactcataataaacatcacatctaaaaagagtgatagtaggaggaaaaaatgagatctaaaaaaacacagtacatgactttcatggcaatgtttcttgctattgaaatcatccttgtcgtaacaccgcttggttatatcccaatcggtcctttaagtgctacgacaatgcacattcctgtaatcattgctgggattacattaggaaaaaaggcaggagcccaacttggtttggtctttggactaactagtttaattcgtgcaacgattcagccgggaattacatcattttgtttttcaccattcgttacagtgggaaacattagcggggattggcgaagcgttataattgctcttgttccaagaatattacttggctatcttgctggagtaatctttgaatttataaaaaacaagtttaataatgaaaatgctgcagcagtgattggtgctttaattggaacgattacaaatactgtacttgtcctaggcggaatttactttttctttggcactgcttatgctgatgcagttaatattgcctatagttcattgctggcaatgttatttggtgttgtgactactaatggtatcgttgaggcacttattggggcggtcgttaccctcctggcatataaagcaattaaaccaatggcaacaaatataaaataatttaaggttaagttaccctttaaattcattactattagtaagaagtgtgttattatcacttcttattttattatagtttatttatacttttggtatttataaaaattatttttacttttacaattaaaatgatagaaacttatcttttcatttagctaatttctataatttatagataaaatagtttcttcttctctttgaggaattgtaaatatgactatatcttttataataaagatatagtcatatcatatagaaaagaggaaaataaaaatggcagattcaaaaattatctttattgatgttgatggaactttagttgattatgaaaacaaattgccagcttcagcagacaaagcaattaaacaagcacgtaaaaatggacatcgtgtgtatatatgtactggacgaagtaaagctgaggtatacccttatttatgggatattggtcttgatggcatgattggtgggaatggcagttatgtagaagatggggatacggttgttatgcatcagttaattactgctgagcaatgtaaacatatcgtagactggttaaaaagtcgagggcttgaattctatcttgaaagtaataatggtttatttgcgagtgaaaactttgaaactcggggagaaccagtaattcaagaatatagtaaacgtaaaggtaaagaacatagtgatcaaattaaagttcgagatgtttttccagaaatgatttttgatggtgaattatatcgtgatgatttgaataaagttagttttattcttgaaagttatcaagatcatcttgattcaattgaagaatttcctgatttaaaagctggtacatggggcggtgcaggggaaattgctctatttggtgatttaggcgttaaagatattactaaagctcatgctattgatgctttattagagtatctaggtgcagatattgaggacacatatgcctttggtgatgctaaaatagatattccaatgcttgattattgccatattggtgttgctatgggaagtggtggcgatgaaatcaaagctatggctgattatataactgatgatgtcgaccaagacggtttgtataatgcttttgttcgttttggtttaattgaagcagagtaaaaaataatataatgaaaacgaaggggatttttccttcgttttttatatattttaaattaaaagagccaatcaactaattttagttaaccgactctttttcttactgtctagatttttttctaaacaatgatttcaaccctcgcttgattacttgaaaaaaactaagtgatcgaactaaattttctgagggaatatatttattaatagcacgtaataatgctttattatcgcgtgatgagaaagtaaaattcccattatttttggtaacaacggcaaagcgaggaatccattttcctttaaacataactgaagccattacacaattaacttcttcccatggaatttgaatataatctctaatatttttttcattatagaattcaaatgctttatcgcctaccatgacttctccgtaattagcaagaccaagataagaagttgctttgactgttaaatctactttagtatttaaagattgtaccatatatttcctcctttacagctgccatgtattttctttattatattacattattccaccaagacgtgcaagaattccgataatgaataaagcaacgataataacgattggtgatactttctttttcaatagccaacagcataataatgttaataataatgctgataaacctggaataagttgatctaaattttgttgtagggtcgtaactttctcaacatttaaaccattagatcctaatgatgcaaactgttctaatgctgatttgatcccgtctacaccagaaggcaaactattccaatcaatatatgcgccctttgactgcgtaacagttgatacaaccggagtaaaagtaatacttacccaacgttgtactaatgatccgataatgaacatcccaagaattgaagcaccttgagtaattttacctaataatccaccagataagtcttgtgcaattgaagtaccaactttatatccaaattcctgtgtataccacaaaaatgcgatacgaatgatattccatgcaaagaaaaagattaatggaccaatgatattaccacttaatgctagagaagcacctaatgctcctaaaattggtctaagagtaaaccagaagacaggatctccaaccccagctaaaggacccatcatcccaacttttacaccttggattgcagtatcattgatttctgctccattagcacgttcctcttctaacgctaatgtaacacccatgactggcgctgatacatatggatgagtattgtaaaattccatatgtctttttaaagccgctactttatcttccttatttggatataattttttgattgctgggataattgaataacaccaaccaccattttgcatacgttcatagttccaagaaccttgaaggaactgatgacgccaagcaacagacatacgatctttttttgataatttaattttttctgccataatttctttcctccttcaagattttaatagtcatttaagatatcgcctaatggatctccagaacctgttgaaccgccaccattagagccactgttttcttttaatcctaaatagatgattgctaaagcaacaccaattgctcctaatgcgatcaatgttaattcaccgattgcagcaagaacaaaacctaatgcaaagaatggccatgtttctttagtagacatcatattgattaccattgcataaccaactgccgctaccattccaccaccaacagtcattccgccagatagccatggtggcatttgatttaatgcatcagttacaactgccgcaggaacaacacaaagtgctgcagcaggaattgcaattcgaattccttgtaataagattgctaaaatttgccacatgtcgattgcacgcatatttccttgttcggctgccccatccataaagtgaacaattgggattgtaagagtacgacagatcattgttaagaataaacctgctactgataaagggattgcaactgcgattgcagtagaaatagctgtttgcacatcagttgctccaccttctaaacctaataccataataattgatgaagctacagaagctaatgctgcatctggtgctacagcagctcctacattggcccaccctaatgcaatcatttgaagcgaaccacctagaataatcccttcagttaagtgaccacttactaaaccgattaaagtacatgccactaacggttggtgaaattggaactcatccagaattccttccatccccgctagtaaggcaattataataattaagattattgtaattaaagacattataattcctccctacattttatttttaaacatttttcaattctgcttttgctttctttaaaagcgtatcaatattttcatttgaatcacttggtactttacgaacattaaaagtaattcctttagctttaattttttcaattgtttcaatatcttccggccccattgcaatagctttatttactaccactttaccaattgaatgagccattgaaccaatatttaattctttaatatctacaccgccttcgattgcccgtaatgcatcttgaggtgtttcaaataataacattgctttggtattaccaaaacgtggatctttagccacttgaatcattttatcaattggaacaacattagccttaactcctggtggcgcggcttgttcaatcatctgtttccgtaatttatcttttgaaacagcatcagaaacaacgatgattcgatttggttgtgttgttttagtccaagtagttgcaacttgaccatgcaataaacgcgtgtcaattcgtgccagaacatatttaatatgtccatcccctaatacagttccctcaggaatagctccttgtgactgtgtattaatagcttgagccgctacttttgtttctggttctaattcttcaggttttacttttaccccttctctagcaacttcagtaacatgtttagcaatttcatgcgctgtttccatcgacattctagaagcataagtctcaatcagcattggtaaatttaaacccgtaacgattgcccacttatcttcatgaccagcaattaatccattagcctgattaaatggtgtaccgccccataaatcaactaaaaatagtacttcgtcttggttttcaaaagtagctattgccgcttccatttttgctttaagatcatcaggtccttcacttggttgcaaagtaactgcttttacatcgacttgatctccaaagatcattgccccggattgtagaatcccgttagcaaactcaccatgactagcaagaataattcctaccattataaattcctccctttcttttaaatactttataacgcaaaaaaacaggcaaactattattaaaagatacaaaaataccatctttgttctttttttaaatagttaatgcctgctttatcagttacacactataaaatattcaatttatgaaacaatattatcattgtaagccttttctgtcaagaaatcatttaaaaattattatttcaaaataatatatttttaaatacttgacaatattctttccaaatgtaatgccagatatcctacttctgtctctggtaatttcttttttaaaacctttgataatgcttcacacatgttacttgcctgttcatatgcaaaaggaaacttatctttagtaaattcacttatatccatctgcaattcttcatttttatttaatcttaaaattaaaaatttaatatgattcattaatcgagcatatgaaactgattgaatatcaataacaatattaagatcattttctaatttaataatactttcatgaataattcgtgttgcctccattgactcagcaacttgattagaagaaattgctgaatgaatatgtagtgtaataaagccaacttcatcatcattgatcattcgtgatataaacttattaattacttcccgtccttctaatgcaacctcatattcatcaggaaacagcaaacgaatatcattgataaatggatttaaaggcattatattttcatccattcgctttattgcaaaatagatatgatccgctaatggtaataagatatcattatcaatttttccaaatttctctattatcagtctaataatctctgatgctatttctaaataaactggatcaatataattgattatatcatttgaaccacttttagctttatatcccttttgcataagaaattttttagcattccgtggtacttcaaaataatcatccactttctttgaaaatccaattcctttatacataataataacttcttcagtctcattacaagctaaaatagtattattatttaatactttaatgatcttatacatatttattttccctctcctagttgcaaatcttcataattgtactcccgctctttattttaccatattctttttcaatctttaaatcatttgatagatttgtaaatattaacaaaatactttcatctaaagcattttctttaatatactctaaatctgcattccaaattaaatcacctttttgcactctttgatttaatttaactaatatttcaaaaccagttccatttaaattaactgtatcagttccaaaatgaatcaacaattcatatccgttatctaatttcattccaattgcatgttttgttggatagatcattgttatctcaccatcacaaggggcaacgatcaaaccgtgaaatggcttgatcataaccccatcacctaacagcttatgtgaaaaaatttgatctggagcctgttcaattggaaaaacctcaccatcaacaatattgcctaattcaagattagtatgatcagtctctttttccagttgataatcatctaattcatcaggaatatttattaaatactcgtctagctttgatttgatcgatgatgctttaggaccataaattatctgaactccatttccttgcataacaactgccgctgcccctgattgtttcaataaaccttcatttactaattgattatcactaactgttgctcgtaatctggtaatacaacaatctaagtccgtaaaattatcacgaccacctagccctcgaacaatcaattgtgactgtttgtcaatttcaattcctttatttaacaattttcgatgacttgctttagggttcttaaagatagataacttcatattatctatctctctacctggagtcttcaaatcaaattttttaattagatatttaaaactaaaataatagagcatgaaataaattattccaatagggataagcaatacccagctagtcttactattaccttgcaatacaccaaaaacaataaagtcaaataaacctccagaaaaggtcaatcccacggcaatattaaaaatatgagcaaccatataagcacttcctgctaagataacttgtaccccaaataacagtggagcagcaaacaaaaaagtaaattcgattggttccgttattcccgttaagatgcttgttaaagccgctgagaacaacaaacttccaatcgcttttttattttccggcttagcagtctgatacattgccaatgctgctcccggtaaaccaaaaatcataaaaataaattcaccagtaaaatattttgtagcctcgctactaaaatgcacaatatttggatcagctaactgtgcgaagaaaatattctgaccaccataaattaccgccccattgacgaccattgaacctccaattgcagtttgccaaaatggtaaataaaatacatgatgtaagccaaaaggaaccagtaaccgtttaattacaccgtaaacaaaggttccaaaatagcctgaggttgagataagtttacctaattcatatataccattttgaaagaatggccaaacataaaacattacgattcccacaaacaaaaaagttattgttgaaattatcggaataaaccgttctccttcaaaaaaagataacgctcttggtaattcaatttgataaaagcgattatgtatataactaacgccaagaccgacgattattccaccaaatacccccatttccaatgacatgatcccacaaaccgctgtaatcgttccatctaaaacatcaggattaattatttgattatctaaaatacttccatttaatgaaagcatcccgctaattgttgtatgcataacaaaaaaggcaataattgaagataaaacggctacttctttcgcctttttcgccattcccaacgctactgcagcagcaaaaataagtggaagattgttaaaaaggccactccccactttagttaagattattaaaaagtcatgtaaaaaagtcccgtttcctaaaactccctctaaatgtagtgaagaaatagttgtttcattagtcaatgaactaccaattcccagaaataaacccgcaattggcaatactgcaatcggcagcataaaactgcgaccaatcctttgtaaaatcccaaaaactctagtcttcataatccctccgttattccaacataatttattataactaaatcgttcgatcaaaaattctttttataattaagaccatgatacttataataatcatgataaagactatctgtcaacaagaataattacttatttatacgatatttactactttttttgtcaatttaaagagaaataattaaaaaaatagaattctattttaatatgctccgcttaagtaaacaaggaacatatcattttgaattctatttctttaattaaatcagtttctaacatatgcttttaatacttttatttcatttttatcaaacggttcaatagtaaactcacctacttgagctggtacaataaaagtttccgcataatgcactgtatatggctcaaacttatttttaggacttttaattactgcactttccccagcaactaaattcatcattaccacacttttattagtttgttgataaatcttttgtttagttgtaataactcgtgtttcaataaattctaattcatgtaatccggttttaacttctgtatattcatcactcttttcaatttctgtaaaattatttaccaaattggattctacccaagtagttgttctttgataatcaattaccttctttccatcttcaacatgaatcgggcgtggtttaccatctaatcctacacgatcccaatcccataatttaaaagtaaaaatatatggtgtagcacttacttccaagactacacaattagccgaagaacaatgaattgttcctgctggaattaagaaatgatcatgcttttttgctggaaaaaaattaatatacttatcggcatcaaaactttgattaccctcattagctctttctaaatcgttaataaattcgtctgaattaatattctcttttaaacctaaatatactccacctccatcacaatcaaggatatagtagctttcatcttgcgtataaggcattccaaaatggctcttgatatattcagttgttgggtgtacttgtaagcttaaatttcctccacccattgtatcaagaagatcaaatctaattggaaactctgccccaaaacgagcataattttttgctcctaaaagctctatagcttgatacataacaacatttaaagctggggttgcaataacaatatcgccaaacttcaaattaatactattctcctctggaaccccatcaaaactccaagcataattagatttacttttatctaaattacaaacctctttcatccattgtcctccccaaacccctggatcaaaatatggtactagacgaaatggttgattgcaaacacttcttaatgcatttcgaaacgcaataccagtaatcattttaggtttattactgcaattagtgtctagatataaatcaatatcttcaaaaatctctcgtttatgcttatcggcaattcgccactcaataaaataaccacgcttattttttattagaggatcttcatcataattactttgtttaaaattaggtaatccagcccgatatcttaattgaatttcccatcgtgttaggtctgcatatattaataaatcacctttagtaattagacttgccccaaaaccgtatacaagaactattccttctttatttttaacaaacttttgtatcttagccagcttagcttcatcaacataatctctaatagttccataatacattactcccctaacacgatcttcagttagattcacctgcatcatttctgtcaattttttaccatcataaaagatatcttcacttaaaattacgtgtgctggagtcaatttttttatcaatacatttaataattcacgatcattaattcccaaataacaatctacaacaactatctttttatttcctaaagattctttaattttcttatcaatctgcgcatatccagaatatgcatcgttgtcatagccatttattttgatataggggctattatcataattactcatttgctttttgcctcctactcaatcttatttatactcaggttctgtatcttcagcttcaaaacatcgtgttctcattaattcttttacccaatcgcctgattttttaattctccgattccgattattttccatatcaatttccacaaacccataacgatttctaaatgcattaacaggtgaaagattatctgtaaacgtccaattcaaaaagccccgacaatcacaaccttcgtcaattgcttttaacatccaagccatatggtcacttaaaaattcaattcgatagctgtcctgaatttgcccgctagcatccttaaacttatcttcatccattactcccataccattttcagtaatccaacattcaatatttcgataatcattttgaatgatcttcagcatatcataaattcctttaggataaatttcccatcctcttgaaaaattcattttaattcctcgtggactatatgtttcataatatgcagttggaataaatggtttatctggattccatgccgtttctctttgtcgaacccgtaacggctgataatagttgattccaacaacttctattttattatcatcaatcttttcaaaatcacctttaacatattcaaacatacactcatgtttttttaataattcaaaatatgcttcatcaaactttccatttatcaaagggtcagtatattgtttataattaaacatatcacaaatttttgctgcttcaatatctttaggattattcatactttttggataagatggtgacggatttaagattattcctacttttccctgataacccatttttgcatggtgctcgactaataaagaagttgcaagaacacgatgataattcatttgtactgattttttagtattctcttcataaggccaaatatttccaaataaatatgcttcgttaggaactaccgcaggttcattaatagtccaccaatatttaatcttatcatgaaaagccgccattacttttttactataacctacaaacaattccatgaccttacgattatcccatgtcccatacttattaataacatactcaggaatttcccagtgttctaaacaaagcattggctcaattccattttcaattaaacaatcaattaccttttcataaaatcttaatgcatcttgatcaacttcattagtttcataatctgtaataaagcgtgaccaatctattgaagtccgatatacttgaattcctaattctttcattaatttaatatcttcttcataacgattataaaagtctgtagacttgattgttccaactccattaaaccatctttctggttcagctaaatacatcatatcgacaaaattacgttgatgttcttttttccctgtccatccctctgtttgccaagcggaagcagaacttccaaatttaaatccttctggtaatctatataactttttcattttattgctccttcgttttaatttcttcttgatgatacgttttgtcaatcattttaacaaatggaatgaacatcaaaactcctattgctagacaaattatttgtacaactgctcccatgatcgagttagttgctaaaaatcctgataaaactggtggtgttgtccatggtattgctactcccgttggatatggacataatccaaatttcataaatagccaggttatcagaccaaacactggtcttgataaaacccatggaataaatagcattgcattcatgaccactggtgctccaaatactacgggttctgaaatacaaaaagttgctggtaaaactgctacctttccaactccttttaatcggttgctttttgatacgattaagattgcaataactaatgacataaaagcaatcataacaaataatgctctaaattgatcagtaattatatatggaacagcatcaccagcagtataagcgctcaaattttccattcctgctgtttgaagaattggatccattacggaaccaacaatttgatctccatgtaatccaaaaaaccaaagcaactgagcaagaccttgagaaatcaataacgctggtaatccagtaccaattaataaaagtggtttttgaataatttcattgactagagcatgaatattgccaaatgatgttaaagtaaaacaataattgatactgcaaactaaaactaatgtaataattacaggaattaacgattcaaaagaacttgataccattggtggtacactatccggtaactttatttttagtttactacttaaaatcttgcaataaactttggccaccaagtaacataaaatcaatgccacaaacattccttgtgaacccatataagtagttggaataactcctccgataacttcttcacccactgttattgataatggtgaaacaatcaaaaaagctactaaagttgtaattcccgcgtatacttcctcacatttttgttcttctgttttagcatagttataccccattaaaaatgctaaaaacattgccactaaacttaaagttgtccctgataatggtgataaaacatttcccagcatttctaaaaagcccgctggtaaaaccttatcaataaatgggaaatttaatacaattaatgtaaatgacccggcaataataaatggtattaacggcatcattgccattctaataacttgaagaaatctaatgttattaattttctgcccaattggcattagcttttcttccaaaaacttgctgaacttgtccatttctcttcctcctcttcaacaaatgttataactttataccattatgataatatactttatttattatgtcaatatatttagctaaaataaaaaatgtgtcaaaatgacacatccctactcacataaatcaataattaattcatacccttgtgaaagatacatagaattagtaaactcaactggaaagtcatgacaaaatcctcgcctttgcctattaatcattgcttcatcacctttaatttcaaatagttctttctgtttttgattcattaatctagcacttattttttcctttacattactaattccataccctgcacccataagtttttcatacagagaaccactataatctccctgttcatctaaaggaacaataggatttaaaaaagtctcgtgaattgaaacaaccatattattaatacggatttctctaactaatcgtaatactttatctttagttgtaatattaaaaaaatctgcaatttcttgaccagcatttaccatttcaacatttaaaacccgacgattctttatatcatttttttctaacacaccattaaatgaagattttagaatagtctctactttgttttccttttctaaaacaatcgtcccttttcctcttcgtcgctctatatagccttcattaatcaatttattcatagcttgacgaacagtcattcgagaaacatcaaattcctgcattatttctagatctgttggcattttatcaccagcattatattcttttgaaacaattctatctaaaagaatatcgaataattgagcccataatggtttatctccaacatcatattttaatttcattttgttttcctcccacctataataaaatctatttaaattactaatttcccctatattatactagagaaacaattcagtttctataaatagtaataaaaacataatatatctatgttataactaatagaaatagacacactttattaaattaaaaaaaaggcagctcagtgctattcactttaactacctaatttagattacgcttttatcgccggtttaccatattttttacaatatatatatcctgcaattccaacgattacaaaaacaatggaaactaattgtgccgtccgtagacccattacatataagctatcagtacgaagtccttcaataaagaatctaaagattccataccaaataaaataactaaagaattgttcaccttgttttgtttggatcttcctaatcacaaaatagattaataaaaatcctacgatattagcaatagactcatataaaaaggttggatgatagtaatatccattgatatgcattccttcaataataaagtttggtaaatgcaatgatttaaggaaatctagactaaccattccaccatatgcttcctggttgaaaaagtttccccaccgtcccagtgcctgagcaattaaaacacctggcataattgcatcagctgcaaccatgaaatcaattttatgtttcttaaaataccaccagctaaaaatcaagccaacaaaaatcccaccttgaatcgctaaaccaccatgacgaaacataatgatctcaagtggattttcagcatataattcgttccacataaagattacataccataatcgggctcctaaaactccagtaatcattaaaccaaagaaatagtctgaaagaatctctttattataaccgatttttttgaaattatattgtcctagtttatatgcaataaaagctccggtaataatacaaattgcataccaagcaatggaaaaagaaccgatttgaacgaatgtcttaccatctggaaaaaaagtcataacttaccccttattcttatcgatattcttcaaaatacgatcaacgaattctttgctagaatcaacaccgtattcacgtaaacgcatattcattacggcagcttcgataattactgacatactacgtccacttgatacaggtacaacaattttaggaatcttaacacctaagatttcttcagttgaatcattttcttcaacccctactcgtgtatattcacgagatggtacccaacgatctaattgaataattaaatcaactttatctttatcgagaattgagctaattccaaacatctttgatacatcaataacaccaattccacgaatttctaataaattagttaatacttctggggctttccccacaatactttgtcctaaatgatataattcaacagcatcatcggcaactaataaatgtcctctttttactaattctagagcaatctcagatttaccgataccactatcacctttgataataacacctttaccgtaaatattcaaaaagactccatgaatcagtgtttccggtgccagtgcttcgtcaagaatatttgttaattcaattgaaacacgtcctgttgctgattcggtaataaaaattggaaaatctttttttcgagcaatctcaattaagattgctggacattcatttcctttagcaacaatgatacatggtacttcatcgttaattaagaaagggaatatttcacgttgtctttcttccgacatctcattaataaatgcagactctttatctccaaaaattataattcgtcgaaaatcgctgtgtttaaaaaatcctgctaattcaaatccaggtcgattgatctcagccacataaattggccgctctaaagatttctcatctccagttacctgaacataatgctcattgtttaataattcacctactgtaattgactttggcatcattgtttcctccctataacatcttctttaaaaaacttccagtataacttgcttcacatttagcgactttttctggtgttccagctacaacgatcgtaccaccaccatcgccaccttcaggacctaaatcaacaatataatcagctaccttaataacgtcaagattatgttcaattataatgactgtatccccttgatcaacaattctttgtaatacctctattaatttagcaacatcattgctatgtagaccagttgttggttcatctaaaatataaactgttttcccagttgcttttttttgtaattcacttgctagcttaacccgctgagcttccccaccagataaagttgttgcactttgaccaagcttaatatagcctagtccaacatcatttaaagtctgtaatttagttttgatctttggcaagtttccaaagaactccactgcatcttcaatagtcatctctaaaacatcataaatattcttatctttataagtaacttgcaatgtttcttcattatagcgtttaccgccacattgttcacaaggaacataaacatctggtaaaaagtgcattgaaatacgttttaacccatcaccttgacaagcttcacaccgtccacctttaacattgaaactaaaacgtcctttatcgtagccacgcattttagcctcatttgtttgggcaaataaatcacggatatcatcaaacactcctgtataagttaccggattggaacgtggtgttctcccaattggatcttggctcacctcaataactttatcaatattttctaatcctaaaatatccttatgtttaccgggcttttctttcgagcgataaattcttgccatcattgctttacccatgatttcatttacaagagtacttttaccactaccagaaacccctgtaaccacagacatagaccctaatggaaacttaacattgatattctttaagttatttgcagcagcaccttttacttgaataaaattaccatttcctttacggcgttttttaggcacatcaatctttaaacgacctgataaatactgccccgtaattgactttttacaatccattacttcttgtggcgttccagctacaattacttcaccaccatgcactcctgcacccggtccaatatcaacaataaaatcacttgctcgcatcgtgtcttcatcatgttcaacaactagaacactattacctaaatcacgaatattttgtaaagtggcaattaacttatcattatcccgctgatggagtccaatagagggttcatctagaacatataaaaccccagttaatcttgaaccaatttgtgtcgctaaacgaattctttgtgcttctccaccagataatccacccgctttacgagataatgttaaatatcctaatccaacatcatttaagaaacctaaacggtctttaatttcttttaaaacaagattagcaatcttcgcttcatattcatttaattttaattcatcaacgaattttaaagctttttcaattgacatatcggtaaattcactgatatttaagccacctactcgtacgcttaaaacctgatcatttaatctgcgtcctccacaagttggacacgtatgttcagccataaatgaagcataccattcttttgaccaagaagaagtcgtttcttcaaaacgacgtttaatcaatgttttaacaccttcaataggacgattagttttagaaacattaccactactagaaacaatctcataagaaattggtttatctgagccttctaagataattcttaattcttttttagtaaagtctttcaatggtttatctaaatcaatcttatatgttttacataggatcaaaaagcgctgccattcaattcggtcagttcctactgaagttttaaaatatctaattccaccttgatttatgctcaaatcccaattaggaatcaataaatcatcatcaacttcattttttattcccaaaccgcgacaatccggacaagctcctagtggattattaaatgagaataatcttggttctagtttaggaacactaaaaccacactctggacaagctaaatgctcagaaaataaagcttcactgccatcacttaaattagctacaactacttctccacctgttagttttaaacctacttcaagtgaatcaatcaaacgactacgataaccttcttttttgataattcggtcaattacgacatcaatgttatgtttcttatttttatcaagttcaattccttcatctaatagtttaacttcaccatcaacttgaactcgaatataaccatctttcaataaatcctcaaataaatccttaaaagtacctttttgattctttactactcgtgctaatacttgtaatttactaccatctggatatttatcaattgtatcagccatttgtttgattgtctgcgattcaatcacgattccatgctctggacagtatgccttaccaatacgcgcataaagtaatcttaaatagtcaaaaatttcagtaaccgtccctaccgttgaacgcggattatttgatgttgttttttgatcaattgcaattgccggtgacaaaccttcaatactatcaacatccggtttttccatgtttcctaagaactggcgtgcataagcacttaacgattccacataacgccgctgtccttcggcatagattgtatcaaatgccagcgatgtttttcctgaaccagataatcccgtcataataactaatttattttttggaatctcgatatcaatattttttaagttattctctctagcccctttaatgactagtttatcatgttccatattttacctaccttctaccatctttaagattgctgctttactgtgcccccgtaattgaagatcataagcccaatctaatagctcgctatacttggatgacggttcaatccctaacgcctttaaatcatatccgtcaactaatggcaactgagctttggttgatagccgtgccatcttttctttcataacataatcaaagcgattaatattttcatgttcatctttgtatctaccaagtttatcacattttgtgattaaaattaagtcttcaatcgtaactattccatcaattcctttaagaattttaaaatagctataatcctttgcttcatttctgaccatattcattaaatgcatatgatagaaaatcattgttttaatatatttttgtaactgtttatctgggataaatgcttttacttcttgattaaaaatctttacccccgcttcattatgacccggagcatgaccgtctttagttgttactgtagctttaccaatatcatgtaataaagcactccacataaaacctaatggattacttgttttatggcagcataaagccgctaaatcagttactaataaagtatgccgccatacatctccttcagggtggtaatcaagccgttgcatagttttcgataatacatctaaacatggccacaaagccttgatctcctttaaaaaagttaacccaattgaaggctgctggcttaagaggagcttactatattcttgaaatacccgctctttacttagtttatccaaacttttattttgaaccatttttttacacattaatttagtcgccgtctcaatacagaaatcaagacgtgaagcaaattgtgctgttctcaagactcttaacggatcttcaataaaagttgtttcactaaccattcgtaatgttcttttttcaatatcttcttgaccatgaaaaaaatcatagatttttcctgtctttatttcatacatcaacgcattgattgttagatcacgtcgtgatgccgcaacttttaaatctaaattttgatttactgtaacatcaaaatcctgatgactctcacctgtctttatttccgttctcggcaaagcaaaatcaaaatttggtaaaacatctaattttaaaattccgaatgatttaccaatactattgacattgccataattagctaataattcttccaattcatcgacactaagcccatatacctcaacatctacatcatgataatcaaccctattgtagatcaacatatcccgaacgattcctccaactagaaaagctctaccatggtgctcgtctatatccttaaagatctttttagcaagtggactgaaagtatacctatttttcaccttgaagctccatgatgatatcgcgaagttccatcgcacgttcaaagtcaagtaccttcgctgcatctttcatttgtttttctaattcttgaatcataacttgtttatctttcttgcttgctttcttaccttttttaactagacttgcagcatcatcgatgacctcttgaccacgaattgcatcacgaatttccttatgaatagttgttggggtaatattatgttctttattataagcatcttggatcttacgacgacgattagtttcttcaatcgcataagccattgaatcagtaatcttatcaccatacatgattacttcaccattactgttacgggcagcccgaccaatcgtttgaatcaatgaacggttacttcttaagaacccttctttatcagcatcaagaatacatactaaacttacttctggtaaatctaaaccttctcgtaataaattaattccgactaaaacatcatacttgccaagtcgtagatcccttagtatctcggttcgttccaaagtctttgtgtcactatgtagataagctaccttgattccaagttctttcaaataagcacttaaatcctcagccattcgtttagtcaatgttgttattagaactctctcattacgatcttgacgaattttgatttcactgataatatcatcaatttgatcctttgttggtcgtacttcaataaccggatcaagtagtccagttggcctaataatttgttcaactactttattttcaacatgttctaactcataatccccaggtgttgctgatacataaatgacttgatttataattttttcaaactcttcgaagcgtaatgggcggttatcaagcgcgcttggtaatctaaaaccatattcaactaatgtctctttacgtgaacgatccccattatacattcctcgaacctgaggcaacataacgtgactttcatcgacgatcattaaaaaatctttaggaaaataatcaatcaacgtataagggcgttgtccttcatcacgaccatcaatatgccgtgaatagttttcaattccaggacacatccccacttcccgcagcatctcaacatcatggcgcgttcgttgttccaaacgttcatgttctagtaatttagtttctgctttgaatgtttctaaacgattctctaattctgccgtaatcgtatcacaagcctttaaaatttgttcttttttcgttacatatccataagctggatagatcgtatatgtattgtatacgcccaagacatgcccagtcagaggatccacttcactgattctttcaactgtatcaccaaataattcaattctaattaaccagctttcagtatgtcctggaactatttcaatgacatccccacgaactctaaatgttcctttagtctgttcaatatcattgcgttgatattgccgatcaactaaatatgttagtaactctttacgatcaatgtcttgatcgacccgcagtgaaaagatcatttctttgtactgttcaggatttcctaatccataaattgaagcaactgaagcaacaacaatgacatcttctcgttctattaacgaattcattgccgcactgcgcagcatctcaatttcatagtttgttttagcatttttatcaatatataaatctcgcccaggaatataagcttccggttgatagaaatcgaagtttgaaataaaatattcaactctattttcaggaaaaaattcttttaattccgaatataattgtcctgccaatgttttattgtgagccaagacaagtgtcggtttattcacagcagcaataacattagaaacagtgaaggttttcccagtaccggtccctcccagtaagacctgttctttttttccttctttaattcctgcaactaattgtttaattgcttcctcttgatctcccattggagaaaacggagaaacaagcttaaatttttgcattgtaacacctcctataagtcctttctattataccaagaaaacagcgaagttaaaagaattatgcccatgatgaaaataactatgccaggcatagttattttatcaattccattaattttttatactgataatcattattttcactattagcatacatgattaccgcagcctctaatttctgccgatcactattagtataaataccatcaacagttaaattattagcttgttcaaattgttttaaggcttccactgactgttgtgaaaaatatccatcattacgtccacagtcataacctaaaatacttaacattttttgcattgaggcaattgctgtaccaacactatcatatcccatatcagtttccagtgctttggtataaataccacttgtatccgtattacttacagaataatcaggtgtcaatccttttccatttatccatgtaccacttggtaataaccattttgcataagtatattttaagactgatccatcactgagctgtttttgcgtctgcgccgttcccttaccataagtttgatccccaactaatttataattcattttttcttgtaatgctcctgcaacaacttctgatgctgatgcagtatttccatttacaagaatatatccatttataaaattatatttttgacaatctttagccttatatttctcgattgcaccgtttttagtttccatttgaaaaagcagtttatcttctttcataaataaacttaatacatcagtggcagctgtaagataccctccgccattatctcgcagatctaagaccaaagtatcaattttttcagcagtaaaagtctgtaaagctgcttcaatatcatcagctgtagtacttccaaaagtattaatttttacataaccaaattttttaccatcattatctcttatttcactagttaccgcactatctacattggctcgctctacttcaacttcttgttgttcagtattacgtataattgtcaacttaactttagtattcgcttcaccacgaattaaatcagaaatttcatcagcactcttaccagcaatactattcccgtcaacgcctgtaataatatctccaacttgtaaaccacttttttctgctggcgaatttttatacacctgcattaccattgtaccttcactaacagttcgctgtgctacaccaataccttcatagttcccatcaacactttggttatatgtcttagattcttcatatgtaaaatatgaagaatgcatatcccccagcgattctactaaagcggtaatagtattccctttgatgtcaacatccttatcattaggatttaaccaagcttcatctaatatttcataagcttcatcaataattgattctgcatttttgctagtactgttagtcggaactgttttttttgctacataaccagatacaaaaccaactgccaaacaaacaatcatacaaacaatgaatagggtttctctaatatgttttgttttctttggcttcaactttggctccggattatgatttgggcgaataaagtcttccatgtctacacctcacattactacattttagcataaaaaattaataacttttagtaaaacttaaaaaacattataaaatattatgtgacaaattttaatcatcccctgctgctcaacaatattattagcactatcaagcacggaattattgtataggaaaagcaaaatatctagttcactgcaaatgatttgatactgtttaattacattttgatataaataatcataagttttttacatcatttagaattcttaataactttatcatacattctccaattagttctattttaaactaaattttattactatattaaaaaaatattatacaaaaaagctgaaagtttcggaactttcctaatactttcaactctagtttttaaaatattcatttattcctaaaacaattcccgtaacaattttatcttgataagtactgtctcctaataacctatcctcatctggattagacataaatcccatttctactattgttacaggtacttgacaccagtttattccactcatcacatcagtaataataacgccacgatttttgctgcctgtttgattacaaatactatttacaaccgtttttgacaatcgttgagaagctgtagcaatttgactacaatatggattagattccgatggtgccatagttaaagttccatgaatactactactgtcatcactattacagtgcagtcgaataaatgctccagcattatttttattagcaatctccgcacgctgttgattagaaatattcacatcttgacttgtccgaaccataattacttgataacccgaatcttctaattttttttgtaactttaatgcaacttcaagattaattgctgattctaaattacctgtacttattcccgttgctcctgttgttactttagcttttgtttgactagctccaggtccaattggctctttgttgctatcgccacgtcgttgatgtcctgcgtcaatcacaattacacgactatcaccaacgattggtaattgaactgttcgcaaagattccggaacaagtacttcgccttctttttcaacaaatgccgtttgttgagcttcaactgcttcagttttgattaattcagaatcattattttgtttacagccactaaaacataacataattaggaaaatactgagcaatttcttcattatttcacccactcttcctcattatatcatagattagctattaataattgcctctaattcaccatcaatcatctcttttaaagtttcacagctacgatcaaatttatgttgatctacattatttaaatgcagtgtcatgatcttactaatcccttgacgattaatgattgcaggtaccccgatatatagcccttcttgcttatattcaccttgttgatatgcagaaactgttaatacggcattttcatcacttaaaattgctgtaattaaacgatttaaagatagacctataccataataagttgcatttttacgtttaattatctcatatgcagcttgttgtacttctttataaattttatgcatctcgttcatatcgatattcatttccacaatatattccatcatactcttgcagccaatataagtattcatccatggtacaaatgaagaatcaccatgttcacctaatatatacgcatgaatatttgttgaggaaatgttcaaatactcacttaataaataacgtaatctagctgtatctaaaatagtcccactaccaattacacggcttgttggtaatcctgatactttttggactacataactcatcaaatcaacaggattacttgcaacgataataattccatcaaatccactagccataatttgctcagtaatagatttcataatttttgcattaacactagctaattccaatcttgtttgatttggtttttgagcagctccagcagtaattacaacaatatcagcatctttacattcatcataaccaccagctttaacctttaaactacttttactatatggtagaccgtggctaatatccattgcctctccaattgctttttcttgatccacatctattaatacaagttcatcaataccaccagtatttaaaatagaatatgccattgacattcctacaaaaccagtccctactaatacaacctttttcaaatcatcatcttgtctcattgttagttcctccttacaaaaccataatagtatttattactaaaattgtcatttgatatgctctattaatttattgtactcatttattataaaattaaaccaggataacaattctttagtcataaaatttcttacaaattaataagtggtaacgaatctttctaaatccatgatagtataataaaaggttatagtattatttaataacatactataaccactatcttttaaatagattctttttcaactataaataatttattttgtaaccaaaaagggttcttaattagtaagaacctcttaatctataacattactaatgaggctatataaccaaccactaaagcaataacatacgaaataaataatattttaaatgtgtcttttttattctcattatattttattaaagctaatgttcctacaccggcacttgtcgttaaacctgtcagtaatgcaccaaaacttaaaccaccggacacatataattgtgtcagtataactgaaccagcacaattagggataaaaccaataactcccgcaatgattggctggaagatccaatttgtttttaaaaggttggttactgtttcttcaccaatccccgcaataattaatgtaaagacgatatttgttaataaaataaagataaaaatattgagtgtatgtcgtaaagccggtaaccaaataccattttgacaaccacaatcacaaggctctacttgtaaatattcataatcatcatgacttcgatgattcaaacgatctactacataaccggtaactgtacctaaaacaatttttaaaacaattaaaacaactaacatttcccataaatcaggatgtactactaaaatagccaaagcttcatcacttgtggcaataaagattgataataaagttcccattgtcaagtaacgcatcgaatataatcgggccgcaataactgaaaaaccacactgagggatacttcctaaaatcgctccgataaaaggaccgacttttccaaactccattaccttattgacaacatcacgattagatatgtattctactaataagcaggccaaaaataatactggtactgtcatcagggattcttgaattggttctaataatatttccattaaatcactcctatctcaattgttagactagcataacttttatatagactttgtttagtttaccatattcttatataatttcaaacttatttctctattatacgctcaattatacaaaaataaagcgctgtttttgtcttaacataatatttataatccttatcttgatgatttaagaaatattagctaaaatggaatcattaaataacaaagggatcgagaataatgaaaataacaaaaaagcagttaaataaaataaaaatgattgtttgtgatcttgatggcacactgtttaaccataaaaaagaaatatcatcagctacaatcacttatttaattaaattacaagaaaatggttatactcttgttcttgcaacaggtcgcttcttttatgaattaaagccatacattgaacaattacagctggaaaaatatcatggctatgtgatttgctgtaatggaatagagatttatgatcttactcacaataagtgtagatctttttcttttttagaacaaatagaaattaacgaactacttcaattagccctttattaccggttaaatatacgtgctaattttgatcataaatatcaaatgattttaaataattggctatactttttaatccccttgattcgaatatttactaaacgttatcccgacctcactttttacaaaaatactgctgtagtaccttggaataaacttggaaaaatttgtttactttcttcacctagaaaattaaagctttttgaagctgctgcacaaacaaaatttcctggactatatcaatattattacaccaacccttactgtgttgaagttgttaaagcagaagtcaataaatgttatgctgtaaaatatttatgtcagttaaataatttaaatttagaaaatgtcttagcttttggagatagtggtaatgatgaagaattattaaacaatgccggtattgggattattatgaaaaatggtctttcctcattaaagaaaaaagctacctatcttactttcaaaaataatcgacatgagggtgtcttaaatatgttagaatatttatttgatgatcttattaaagataaaaattaggctaacagcctaattttttatgacaaccgatttttaaaatcacaataattgaattctttgattattttaagtttttctttttgttttaaaacaatactaggtaagttcatcccattaaaagtattattttttaccattgaataaattgccatatctttaaaccataactgttgtcctacctgtaaaggctggtcaaatgaataatcaccaataatatctccagctaaacaagttggtcctcctaagcgatatgtgtatgttttaacatttggtagtgcactatcgataatttctggtcgatacggcatctctaatacatctggcatatgacaagctgctgaagtatccataattgcgatagccataccattgtggataatatctagaacactggaaactagaaacccagcatttaaagccacagcttcacctggctctaaatatacttgtacttgatatttttcttttatttcattaataatttttattaatttttcaagatcatagtctttacgagtaatatgatgaccaccaccaaaattcaaccatttcatttgtcctaaatacttaccaaatttttcttcaacagccctaatagtagttattaaatcatcgctgttttgttcacatagagtatgaaaatgcagtccctctattccctcaagcagttcttccttaaagttttctaatgttacccccattcgtgaaaactttgcgcaaggatcatagatttcatgacctatttgagttgaacattcaggattgattctaattccacatgaagtacttgtttgttttgctagattttgatatttttgccactgattaaatgaattaaagactacatggtcacatatattcatgatttcttcaatttcatcatcacgataggcggtactaaaaacatgattttctttatgcatctcttcatagccaagcttagcttcatatagtccactagcagttgtcccatctaaatattcagctattagagggtaaacactgaacattgaaaaacatttttgagccaatagaattttacaaccagttcgttctttaaccgtataaagtatttttaaatttttttctaataattgttcatcaattaaataatatggtgtcttcattaatctactaataccggattatgatcttcaatccatggcaatccccatttatttaatgcttccataaatggatccgggtcaaattcttcaacattataaacaccggctctcttccattgaccttgtaataacagcatcgttccaatcattgccggaactcctgtagtataactaacggcttgagacccaacttccttataacattcttgatggtcgcatacattatataaataatattttttttcttgaccgtcttttttcccttgataaatgcatccaatatttgttttgccaactgttcgtggtcctaagctggcaggatctggtagaactgcttttaaaaattgcaatggaataatctgtttaccttcatattcaattggttcaatcgatgtcattcctacattttctaagcactttagatgtgttaaatagctttcgccaaaagtcataaagaatctaattcgtttgattcccggaatatttaaacccaatgactccagttcttcgtgatgcaacaaatacatatcttttttaccaacttgggcaaaatcatattcacgtttaatttccattggttttgtctctacccaatgtccatcttcccaataacttccgttggcagatacttcgcgaatattaatttctggattaaaatttgttgcaaatggatatccatgatccccaccattacagtctaaaatatcaatataattaatttcatcaaattcatgctttaaagcgtaagcactaaatacacctgttaccccaggatcaaaaccacatccaagaatcgctgttaatcccgcctgttcaaatttttcacggtatgcccattgccagctatactcaaattttgctgtatcttccggctcatagttagcggtgtctacataatgacaaccagcttccaaacaagcatccataatttttaaatcttggtatggtaatgcaagattcaaaactacctctggttggaaatctttcattaaagcaactagctcttcaacattatcagcatcaacttgtgctgtatgaataattgtttttgttttcccatctaactgcgcttttagtttatcacatttactttttgttcttgacgcaatcataatttcttcaaatatctcactgttttgacaacatttgtgaatcgctactgttgcaactccaccacaaccaataattaacgttcttttcatttattttctcctttattcattgctaataataattcccttaatactttgcaagcgactgccgttgatcctccactttgatcataaacaggtgataattcattaatatccatagctactacatttagctcacttacaacaatcatcgcctctaatagttccataaaagtcacgcctcctgcttcgggcgttcctgttcctggaaatacactgggatccaagacatctagatcaattgtaaaatacaccggatacccgcggcatgcctcaattgcttttgatagtcctgtaaaattaaatttatttaaattagtatgttctctagcaaagtaaaactcttctcgttcaccactacgaattccaaattgatatattttattatcaccaattaaatcatatattcgtctaatcacagaagcatgggaaagtttttcacctaaatactcatcacgtagatcggtatgagcatcgaaatgaataacacgtatctctggatatttctcaaatactgcctcaaaagctcctaacgtaacaagatgttcgccaccaatcatacatggtaatttatttgctttaataattgtttttgttgttactttgattatatctaatgctttgcggggatttccaaatggtaattcaagatcaccaccatcaaaaactttaatatcttctaaatctttatcctgatagggactgtatgtctctagaccaaatgactcttggcgcattgaagatgaagcaaaacgagttcccggtcgatatgaggtggtactatccattggggctccaaagattacacactcagcttcatcaaacgatgcctctagtccaataaacgtctgtatatttttattccacatctcttaataactcctctacataatttggtaatgcaaacgaacctacatgaatgccggtattataatactttgttttcatccctcgagcattccattttgttttttgaaaatctttgatgggatgatatttttttgaagcaaaaccaaataaccaatgccctgaaggataggtaggaatatgcgcttgatagactcgagaaatcggaaaactttcaacaattcgtttatgagcccgttgcattgcaacagcatcttcttgataaaaaggactttcatgttgattaaccataattcctgtatcatttaatgctttataacagttaccataaaattcctttgtaaacagtccctcacccggtccaaaaggatctgttgaatcaacaatgatcaaatcatattcattttctttacctctaacaaactttaacccatcttgataatagatttgtaatcgcggatcatcaaaacaacatgctgtcatcggtaaatattttttacttacttcaacaactaactcatctatttcaaccatatcaatcttttcaatcgtttcataacggcataattctctaattacacccccgtctcctgctccaattactaatacttttttgacttcaggatgaactgccataggaacatgaacaatcatttcatgataaatgaactcatctttttccgttagcatcatataaccgtctagcgctaaaaatcgtccaaattcttttgagtcaaaaatatcaattttctggaattcactttgaccactaaataactgacaatctactttaatcgaaaaattcacaccatttgtatgtctctccgtaaaccataattccatttatttcatctcccctttaaaacattaagtttatttattgccatatcttcaggaccagtcataaagcaccctttttctttagcatattgaatataatctagaatttctttcgtgatcctttcacccggtgctaaaattggaattcccggaggataacacataacaaattcactgcagactcgatcaatactttgataaagcggcaacgattctttttctccataaaaagctgcttgaggagaaataactacttcaggattaatatattcatgatcaaacattcctgtccgatccttcttaaaccgccggcgtatttccaaaagtgctccgattaaacgctcaatatttgcttcactatcaccgaccgagatataagcaagaatatttccaatatcaccaaattcaatttgaatcccatactcatctcttaataaatcatatacttcgattccagccaatccgatatcaagtgtaaatattgataatttcgttacatcaaaatcataaacactatccccattgatcaattccttacaataagcataataatcaccaatttgattgatttctgtgcgtgcgtatcccgcaaggcgacgaaccctgttaaaaatctcattaccatgtatagctaaatttttacgtgacatatctagactcgccatcaataaatacgaaccgcttgttgtttgtgtcaaattaacaacctgacgtacataatcagcatttacattttctcctaacagtaagaaagagctttgcgtcaagcttccacctgatttatgcatactgacactcgccatgtctgctccagcctccatcgctgacatcggtaaatcatcattgaaataaaagtgtgttccatgtgcttcatctaccaaagcaagcatattatgcttatgtgccaatgcaacaatcgcttttaaatttgaacatatcccataatacgtaggattatttactaagattgcttttgcatcgggattatctttgattacttgctctacttgatcaagtgacatacctagagatattcctaatcgtttatcaacatcaggatttacataaatcggaaccgccccagtcaagatcatcgcattaatggcactacgatggacattacgtggcataataattttttctcctgctttaacacttgccataatcatactttgaactgctgaagtcgttccgcctaccataaaaaaagcatgagcggcactaaaagcatcagctgctaattcttctgcttctttgattaccgaaactggatgacataaattatccaatggcttcattgaattaacatcgatactcatacacttttcacctaaaaaatctgtcaattctggatttcctttaccatgtttatggccaggaacatcaaagggaactaaacgttctcttttcatttgctgtaaagcttcataaataggcattctactttgatctaatttcatattgcctcctaaaaaatattacttccactgtaaatctcaatcatttcttgtcgtaaattattcgttatctcaagtcttacctttggcggcaattcatagatatctgttttaaataagtaattttgtaaatcaatttctttgattaacatcttcgtatggaacaaattagcctgatatacattaatatctgtagcatcatagttaagtaatgttttaacatcaataaactgttgaatcgaagtcattgggctatccataaaaagtttctttcccttaatatcccgagtaaaaccgcggacccgataatccattgtaatgatatcagagtcaaagctgctaattaaaaaatctaacgttgacaacggtgatatttctccacaagtagccacatcaatatctaccctaaatgtcgcaatacttgtttctggatgatattcaggatacgtatgaacagtaatatgactcttatctaaatgccctaaaataactcgatcatcaacttcttccatttttccttgacgactttctaacatctcttcttccgctaataacattgttacactggcgccttggggatcataatcttgttttgaaacatttaatacatgggctccgatcatattagctacttcataaagaatatcagtcaatcgctttgaattatactgctcatcaatgtaagcaatataatctttttgttccctctgacctttagcatagcaaacatcgtaaatattaaaacttaatgatttagttaggttattaaaaccatataattttaatttctcattcataccagtttccccttctccataaaaaaaactcaagcaggtacaatcccacttgagtatcaatacgacatattattagaacatcaaaaaatatcctatattattagcgtcagagtctatatagcaagaattacttttactactcttattgattgtttcacaagtgtgatgtgcctaagcacacggttgtatagtcaccaactcaatgctaaggaatttagcatcaacttataaaattcgaactttcgttctatcaataaggcaacaaagttgccggtccggcctttgacctagctgtccgtatggctttaactcctaagagtggtcaaaagattcccgcaaaatagataactccttttgcaatatctaaattataaatcattagtttttaaaaagcaatcctaattttataaaataaaatttattgtttaatatactaaatatttttgataaaaatataattataataaatttctttaaaaagaataattaaattaataaaactaggatattcaacatatttataaaaaaatccaggctctcacctgaatcattttataaaccttttgtattatattttaaacaaaacaatataaaataaaattgttataaggacactataaagtgtcccaatcagataatattcggcaaaatcactatcttctgcaatcttattataacatgcaatcgactttgctgttaatactagttcttagaatcaattatatccccaataattactgtatacatattaatcactttcttgatattattgtaacttaatcagtttaatttatcaatcaaatataatttataattaattaaataccgtttatattaaaaagtctaacctaagtcagacttttataattataattctttaacatttattctagtaattgcctttttaagtgcaatttcagcccgcaataagtcagttttttcggttacttccttaattctttgttccgcccgacgtttagcttctttagcacggttcaaatcaatttcatctttagattcaattgaattagcaattatttttgtttcatcatcattaacatatataaatccaccaccgatggcaaatatatgacgttgtttatcaatgatataactcatctccgagatttcaatcccgcttgctaaaggcatatgatgagctaagattcctacctgtcctgctgttgtgcgaagatttaactgattaacttccacttcttggtagataccacttggtgttactatcttaagcttaaatttagtcatttgctaatgtcttcgctttttcaatagcttcttcaattgtacctacattgtggaatgcttgctctggtaaatcatcatgcttaccttccaggatttctttaaatcctttgattgtatcagcaacacggacatatttaccatccataccagtaaactgactagctactgtaaatggttgtgataagtagttacggacacgacgagcccgagctactgttaatttatcttcttcacctaactcatccattcctaaaatagcaataatatcttgtaattcttggaaccgttgtaagatttgttgaaccccatgggctacctcatagtgttcagtccctacaactaatggatcaagggctcttgatgaagaatttaatggatctacggcaggataaattcctaaagccgcaattgaacgatctaatactactttagcatcaagatgagcaaatgttgttgctggagcaggatcagttaagtcatcagcaggtacatataccgcttgaactgaagtaatagatccttttttagttgatgtaatccgttcttgtaaagcacccatttcggttgctaaagttggctgatacccagcttgtgatggtacccgtccaagtaaggcagatacttcagatccagcttgagtaaaacggaaaatattatcgatgaataataagacatcctgaccttgttcatcacggaattcttctgccatagtaagacccgttaaagcaactcttaaacgagctcctgggggttcattcatctgtccaaatactagtgttgttttagataaaacaccactttccttcatttcataatataaatcattaccttcacggctacgttcaccaactccagcaaaaactgataaaccaccatgttctgtagcaatgttattaatgaattcttgaatcaatactgttttacctactccggcaccaccgaataatccaatctttccacctttgataaatgggcagatcaaatcaactactttaattcccgtttcaagaatttcagtttctgttctttgttcggcatatgtcggtgcagatcggtgaattggcattttcttagtgctatcacctaatgcttctttaccatcgattggttgtcctaaaacgttgaacattcttcctagagtttcatttccgacaggtacagaaattggatttcccgtattaagagcatccattcctcgttttaccccatcagttggtcccattgcaacacaacgaactacatcatctccgatatgttgagcgacttcaactactagaagttcatcaccattttggatttcaatcgccgtatttaatgctggtaaattgttatcaccatcaaattggatatcaattactggccctttggcactaattattttaccaatattttgtgacatacggcacctccttattgtgcattagctcctgctacgatttcactaatttcattagtaatcgcagtttgacgagcttgattgtattttaataataattgttctgtaagttcatcggcattatcattagcattttccattgatgttcttcgtgcggcattttcacttgtagctgattcaatgatataaccataaatcactgcttgaagatacattggaatcaaactgtctaatacttcctctggacttggttcaaataatgttgatttctttgagatttcaatatgatcaaaatcacttggatcaacaggtaataacgtaacaattcttggtctaaatgttaagttattaacaaactccgtataaacaatcttaattttactaatttctttttcacgatacattttagttaattcagcaactaacttagttacatctttaaaatcaaaagttgtatttaaatcatcaaacttatgatccgttaccccttgatgattttttaataaataactagttgcctttgaaccaatactataaacataatcacctggtttgattgcacctttaatttctttaaagatattggcattatatccaccacatagtcctagacttgaagcaataacaataaatacttctttttcaatatctttattttcaactaaatagatactatcattattacccttacaattagctaagatctccgctacagtttgagcaacattagtataataaggtttcgactgttctaattgatttcttgttttacgaagtttagaagttgcgactaattccattgctttagtaatttttttagtcgattcaactgatttaattctccgcttaatttcttgcattcctccaggcatagttaactacccctttgtttgagttttttcgaattgtgttacaaaagcactcataacatctttcatgcgtttttctaaatcagcagaaattgctttttgttcattgatttcatcaataatatctctttgcgtcatattgatatgttcaactaactgatccataaaagcagacacctgttccacttctaatgtcttagtaaatccatattttaaagcaaataatgtaattacttgcgttgatacagttcgtggtgaatattgtgcttgttttaaaacctcacgcacttttgcaccatgatctaaagttgctttcgtagcagcatctaagtctgaaccaaattgagcaaatgcttgcatttcagcatactgcgctaattcaagttttagtgaacctgatacttgcttcattgctttgatttgtgcagctgaaccaacccgacttaccgaaagtccagtatcaattgctggtctaaatccagcattgaataattcttgttgtaagaaaatttgtccatctgtaattgaaattacgttagttggaatatatgctgagatatcacctgcttgtgtttcaataattggtaaggctgtgattgaacccccaccattctcttcatttaagcggcatgctctttctaataatctcgaatgtaaatagaagacatctccaggataagcttcacgccctggtggtctttttaataataatgataccgtacgataagcaacggcatgcttagatagatcatcataaacaattaaaacatctttaccttgatctaaccattcttcagcaattgcacaccctgcatacggtgcaatatattgcactggtgcaagttcactagcagatgctgacacaactgttgtatattccattgcgccacctttacgtaacttttcaacaatttgggcaacagttgaattcttttgtccaattgctacgtaaacacaataaatatcttgatctttttgatttaaaatagtatcgattgcaatcgcagtctttcctgtttgacgatctccaataatcaactcacgttgaccccgaccgattggaataattgcatcaatcgaagtaattcctgtttgtaacggttggtcaactgactttcttgtcataaccccgctggcaactctttcaattgggcgagtatgtgctgtaatgatttctccattaccatcaattgcttgtcctaaaggatttacaactcgacctaacatctcatccccaactggtatttccataatctttccagtacgtttaacttcgtctccttctttaatcgtactttcagatccaagtagtacggctccgacgcaatcttcatctaagttcattaccattccataaacatcattagggaaggcaagtaattcacctagcatggcattatctaaaccatgaattaaactaacaccatcgccaacagtcatgactgttccaacgtctttaagttcgattacatcatcaaagtgcttaatttgttctttaattaaagcactaatttcatctggtctaagccccactattttcacctactttcttaatagttcttttttcaataatgcaactttgtttttgatagagccatcaaaaacacgattatttatttcgactttaattccaccaatcagtgatggatcattaactactcttaaacgaatcgttttattttcctttttacttaaagcatcttccacttctttaacttcttgcacactgatatcatagttagtatataaaataccttctaagattccaaaatgctcattcgttaacgctttaaatgcttcaattatttccataacgtaacgcattcttctttttctaactaaaagttttagaaaattaacgacataatcattaacctgtcctttaaaactcttatctaataatgcacatttagcttcatcttctattaaaacatgactaaagaacggaacaaaacttggatcactttcaaaaacagttctaattaaatcaatatctttagaatatgcttcaacttgattcatctctttagctaaatcaaatagtgattctgcatatcttactgctactgcatccattagttaaccacttcttcaacaaagtcttcaaccaaagctttgttagtctttgtatccatttctttgttcataactttagtcgctacatcaatcgcaacctcaacaatttcttgtttcatcgctgcttttgcctgcgctttttcagcctcaatctcacgacgtgcttgatcaagtttagctttatattcctgattagcttgttcttgaatcgttgcctttgtttttaaagcatcttctttagctaaattaacaatttcacgatattgaactgccgcttggcgtgcttgttcttcactttcttccatcagtgctctagctttttcattcatatctttagcttcgtttacagttccttcaataaattctgcccgtttagcaaaataattttgaactggaacccataaatactttttaaagacaagaagtaaaactcctgttgaaagtaattgaataataattgtagttacattagggaataatttcgatgctatatctggcatacgtattcctccttagctaatattagtatacaaataataaaattaatgaaattaataaaccatagatagctgcagtttcagttaatgcaatccctagaatcattaacgttctaattttaccttccatttcaggatttctacctaaagcttctaccgccttactcgcacaaattccttctccgatacctgttcctaaaccagcacatactgcaatacctgcaccaattgcaattaaacctacatctgtcataatttaaatttcctccaatattttctatatatttttttgtaatttatatctaactaggatacctagattagagcttactcgtcgtcttcgttttccatcataattaagattgatgataaagttacgaaaactaatgtttggatacaccctgcaaaaatatcaaaataacaatggaatacaggggcaataattggacctaaaaagttaaagttgattacatggaatgaaatccatgctgtaaattgataaatcaacgtcattaaaatagatccactcaaaatatttccaaataaacgcattgaaattgaaattaatggtgataagacacttaaaatattagttgggggccacacagtatcccacacatatttaaaaaatccctttttcttcaacgcattatattgaatcaatataaaagtaataaatgtcatcgcaaaggtaatagagtagtttgaggttggtgattcaaacccaatcaaacttgataagttactgaccaatatgtaacaaaataccattgcaaaatatggataatagttcttggcaaatttcttaggcatgattgatttcatataatcatcaatagctttaactcccgtttcaacaaccaatacaattccttttggtttgacagttggatccgccaatgctactttttttccagcatagacaaagaacacgcctaaacaaaccataatgactagtgaataaattaattctacttgaattgtcactcatttcacctccttaaaatatttagcgttttatatatcctaaaatattgatcgtaatcttggtcacaaaatatccaaagaaaacactgatcaaattaaagatatcatcaaatttgattgctagcatgaaacctgcaatatacaataacatcttagctataaacatcattacaacaaatcgaatcgcctgacccatttttaagatcacatcactcattacaatgataatatagaatgataaaacgctgaccgcatatcctaagataaatcctagtggaaaactaatttgttttaggacaaatcctacgatagaaaagataactaatccgccaataaatacttttacggattgttttaaaacatctttttcgttcattctttacctgctcctaaaagtattttaataacgtagccaaaggctaaaaacaataaaattagtagaatcgtgggatgggtattaaaatacttatctaagcgcagcccaacaattacagctaatagaaatgctccaattacctgaaaacccaattgtaggcaaaagaataaatcttttaacattttcttcttatcttgatccataatccctcttgtattctactatagtcttttggttatgtaaacttcttataaaaatttgtaataattatttaacactatgataatttatttatagaacaagtatttcagtactaaacactataattaatttcataattagacgttttaaccacttttgaagtatctcaaatattaatcagtaccaaataaacgatcaccggcatcacctaaaccaggcacaatatagcctttttcattaagtttttcatcaagcgtcgctaaaatcaattcaacatcaggatgatcttcttcaattactttaacaccttcaggggcacctactaaacagactaaacgaatatctttagcaccacgggctttaatatttgtaatcgctgcactagcactaccaccagttgctaacatcggatcaacgatgattacgatagaatcttctaaaccactaggaaatttagcataatactcttcgggaattaaagtttcctcgttccgagccattcctatatgaccaatcttagcagtcggtataattcttctaaaaccatcgactaaaccaatccccgctcttaagattggaacaagaataatttgttttttcaattcttttccaatcattggacaaattggtgtgacgatttccttatcaactaatggtaattctttagttacctcataagccattaacattgcaatttcgtctaggttatctttaaatacgattgttttcgtatctttatcacgcataattgttaatttatgatcaattaatgcatgattgaggatggtcgttgccatataaattcactccttaaatgtattttatatcatgatacatttctactttatcagttaatgctctaactctctttaagcattcttctttgatttcatcagtttcttcattttttaagcgataagcaataatcttacctacttctctaaaatcttcttctgtaaatcctttagtagtcattgcaggggtcccaacccgaataccacttgctttaaatggtttttctgtatcaaatgggatagcatttttatttgcagtaatattaatttcatctaataaacgttctgcttttttacctgaaataccgcaacttgcttttacatcaattaaaatcagatgattatcagttccgtcagcaactaatctgaatccctcttcttttaatgctgtttctaatgctttagcatttttaattacttgagctgcatattctttaaattctggttgcattgcttcataaaaacaagcggctttagcagcaataatatgcatcaatggaccaccttgcattcctgggaacacagcacgatcaatatcagctgcatatttttccttacacataattaccccaccacgaggtccacgtaaagttttgtgagtcgttgttgttacaatatcagcatgaggaaatggtgatggatgcagtcccgctgccactaaccctgcgatatgtgccatatcaaccataaacatcgccccaacttcatgcgcgcattttgccatgtattcaaaatcaatcgttctagaatatgcactagcaccagctactactaattttggtttgacctcttggcattttttcttaaaatcttcataatcaatagtttcagtttctttagttaccccgtaactgtggaattcataattgattcctgaataatttaatggatgtccatgtgttaaatgtccaccatcagcaagagacattcctaataccttatcaccatgatttaataacgccatatataccgctgtgtttgcttgcgctccactatgaggctgaacattagcatactcagcaccataaatcttacatagtctttctttagctagtgtttccacttcatcaacaaatttacatccaccataatatctttttcctggataaccttctgcatatttattagttaatacagttcctgccaattctaagatttctggtgaaacaaagttttcagaagcaattaactcaatattgtttctttgacgatttaattctctctctacactttcaaatactgcgatgtctttcattttactcttccccctcgtaagccatcatttttgcaatccgctggtcatgtcgaccaccttcatatttgccttctaaccaggctgttaaaatttctaaagctaaaccttcaccaataactcgttgccccatagcaatcatgttagtatcattatgtgctcgagttgctttggcgctaaatacatcgtggcataacgcacagcgaattcctttcactttattagcagtaatacttacaccgataccagttccacatacgacaacccctctatcgcacgatccactagcaaccgctttagctgcttttcctgcataatcaggataatcacaactatcttcgctgtatgttccgaaatcttctactatgtaaccattagcttctaaataatcttttaaaacattttttagtcttaagccaccatggtcacaagccattgcaattttcattcaattacctccgctatttgttccttagaaatatcacctaatcttaatatttccactttacccttacttaagtcaacaattgtacttgccttcttactgatgctttcacctttaacaattaaaggaatctttccatgaaatactttcattactgctttgtcgtcaacaagactattttctccagaaagattggcgctagttactaacattggtcctgttttatctaataatgataaaacaaatggatcatctggtatcctgattccaatagtatctagtgaagccgtaaaataatcatcaatatgtgggcgtttctttaaaatgatagtgatcattcccggcataaaagccgcaataagtttttttgcagtttcatcaacataagcatatttttcaatatcctctgccttactaatcatcatagaaattgcttttcctttatcgcggtgctttaattcatatagtgcatccaatgcctgatgtgagccaaacttaactcctaacccaaaaacagtctcagttggaaaagccacaactcgactatcgctaactaacttagcgacttcttcaatggcatttttttcgactgaaactgtattcatggaatcacctcatttgccccattatacaataaataattgaaaatttgtagatatttcgtagatattttcacgacaaaaaaagttttttaaaaaaaacatctttacattatcttaacattgctaatttccttcatttttatagtttgataaggcaatttcttacaaaaaaacaattagatttaatctaactgccatttacattttttcatatcaacattgccattatctttaaaacatacatcttcttctaaaagtaaatcacgttgttcgtaccattcaggtacaagtcttcctgcgctatttacaactcgatgacatggataatctccatacatagaagcatgacttaaaatttttcccactaatcgcgcattcttgggtcgtcctgccaacgatgctatttgtttatagctggcaactttcccccaaggtatttcagacacgattgctaatacttgaaaaattaaatcctcatccatataatcacctcctatatttttattttatctaattatcgaaaaaatgcaaaaaaatttatttttttgtattttattatacttttttgtataattattttattagcttgggaaaggagatttatgaaacagtttaaaaaatctttattaataatcggattatgctttttaatgattggctgcactaatgatgccatgagtaaagtaactaaaaagcttcaagatgctggatatgatatttcttatttaaccgatgatttcacagctgtaaatattactaagacagaaaaggataaagaccgcattcaattttgtgcttatttagaaaagaaggttgttacttctatttcatatattgtcttacctgccgataatagtaatatcgataaaacgattattggttttatctatgtcgacaaaaatgatgataatattattagtgaaagtgcccaaaaggaagctaaaaaaatattaaaaaaattagatttatctatagatgatctagtaaactatgcccttcaagtccatgaagataaaggaaaatctttaaattcatagtctgaaagacactttttaagtgtcttttattatttttaaaatataaaacgatctcactttcatgagatcattttacactatggatgacatctactgcaagggcgatatcctgtatttattgcagtagattttgagatagctattttactacgtgataaatagccacaaccacttgaatgatagcagtctcctgtcttggtaatataaacagttgtagaaatattatcatctgccacaggcgttcgaatagaggatgtttctaccggttttccttttacggtcacattacatgtaactgatttatttttaattgctgctgttatttttaccgttcctgattttaatgctttaatatttccactttgatcaactgtcgcaatcgtttcatcactagatgtataaactaccggttgagtactatttgtttttatatttatagtattattttgattttcttctagatttaatgtagtagttgaaagctctaattctaatgccttaatacttactggcatgatcaaggtagatgtatttccgtatttatcacttgccttaatactagcattataatttccagctgctaaataacttacaccactatcatcaatttcaagctcatattttgatagttcttttatttctaaataatcacgataatctatttcatcattttcaataatatcaatttcttttgtttggattaattgcggtgctgtcgtatctttgatattaagcgttaatttctttttactattaccatatttataagtgatagtatatttacctactgctggattatcttcatcaaaaccatcacagctatatgaaatatcttcttcatcaaatttattcttatcaacataatctaaataattaaaattttctccatattctagattaacagtattctctttaagtattaatttcggttgctctttccccaatgcaccaataatacctaataaaataataattatgatcgttaccttgatcttatgagctaaaatatagtcttttattttcttcattttatctttactctcccataaattcacataatcattatactattacttatgaaaattcacgatatttttgtcgtaaagatacggtttattacgtaaaacaagataaaaagataggatattaatgaaacgaacctatctttcttatcttaattatttttatactgttttatataattttgataccaggcaaaactatctttcttatatctttgataacttcctttaccctcattatcaccatcaacataaattacaccataacgtttttccatttcacaactgcctgctgagactatatcaatgattccccacataatatagccaatgacatcaacaccatctctgatggcttcatcaatttgttggaaatgctggtttagataatctattctatattgatcatgaatagagccatcttcttcaaacttatcatgagccccaaaaccattttcagaaataaatacgggcttgcgggtgcgatcatacattttatttaacatgattcgtaatccaattggatcaatttgccaaccccagtcacttgctttcaaataaggatttttagttgaaacaactaagttacctgctgtttgctcactgctctcttcaaccgttgcgacggcactagaataatatgaaaagcttacaaaatcacaggtattatctcttagcagcttacgttcttcctcagttattatgatattaatcttattttcttgaaaaaaacgattcatataactaggataatagccattagccaaaacatctactgcgaaccattgatgaatttgttcatctctcactgctttaagattgtcttctgggcgcggtgttaacggatagtaacaaaaacaagctaccatacagccagattgactttgagaacttattttatgccctaattcaataaccttagcactagcaacgaattgatgatgcaatgattgaaatactagactttgatcgtatggtcgatctttctcttttactaaaccaactccattatatggactaaaataaccagcatttatttcattgaatggtaaataataatcaatatattctccccaatgttcaaatacagttttagcgaatcttaagtaaaaatcgactaatatattgtttgtccaaccaccataggtttcaactaaatacaatggtacagcataatgattcatggttagaaaaatcttcattcctgcttgatgaacctttttaaaaatatggtcataaaaacgtattccttcttcatttggcatttcttcatcaccatgtggatacaatcttgcccagctgatagaaaagcgataaatatcaattcctaattctttcaataactgaatatcttcatcaatgtgatgatagccatctgatccttggcggaatggataattaccaacttctttacatgattttgcttcatcaattatatcttgtgtcaataaccttgttgaagttgtagcattagacgttctttttaaataaggtcgacagtcctgagtatctaaacctttaccaccgaaattatagccaccttcatattgactacttgcagtagctccaccccatagtatttttctttttttattcatttgtcctcctccttctaaaaataaaggtgataaaaatcacctttattttttacctaacaagtatgctccatattctggactgtataaaggggcaacaagctgacatgatagtggctggagataattattcaatggctttaatacataatcttctccatattcaaaaactccaccaatatacgatactttaaagggagaagtaaagtttttggccaatgttttaattagaacagcaatttcataagctgcctctttatatatttgtaaagcatatttatcattatctttagctgctataccgtttagttttgctaatgaagcaattgatgttcgatcatgattaagtttattaataaaagtgataatatcgtaatcattttctagtttacatttttctttaattaaatagtataactgtgtcttttctagtcgaccatcaacttgttggcaatagagggctaacatgcgcttggcaatccaataagcacttccttcatcacctagctggtagccccatcctccacatctagtaatatggttatttttagatgataatgcgattgaacctgttccagctacaactacaatcccatcaccaccacctaaagctccagtaatagcaatcctaacatcactgtataaggagaattctcgatttccaaatgcttccttacaaatagtcgcaattttatttctaacttctttttgttctccatatccagccagccctgcaatcacttttgcttgaaaatttgcatctaattccatcacaccatcttttaaaatttgaatacatatttctcttggttgtgttaaaacatgtactgatggctttattatttcttttaattttcttcctgcatcatcaaagagtgccatctttgttttagttccaccaccatcaataccgatatacaacataaataactccctattttctatgcacttactgcttctttagatttttcctctgctaataattcattatcgtacattttaaagaacggataataaataatcactgatataataattaagataatatttaataccgcagctcgccagtcaccaccgcaagccaagtatgcaccaattggtcctggtaatgtccatggagctattgtaacagcacaattgactaaatgcatagaagttgcaatccaggcaatagttgcacaaattagcggaataataataaatggaattagtagcattgggtttaaaacgattggagccccaaaaatcatcggctcattgatattaaatattgacggtaaaatcgttgttcttcctaatgttttaccatatttagattttgcttttacacagaatagtattgctaatcccaatgttgctcctgaaccaccgatatgaacaaaccattgtaagaatggttctacaccaatatgagtagccgctttaccagctgcaattgcagctgtattttgatctaataaaattaaccagattggtcttgctagcgaagaaacaatcgaatctccatgaataccaaatgaccagaaaaacataattaaaaatatgattagtaatgttgatggtaaggtatctgttgcatttatcaatggcttgattaagttaccaacgatagtatgcacattgatacctaaccacattgtaattgtagaaactcctaaaataataataaccgtaggagttaacgattcaaaagatcttgctactgcagggggtactgccgccggcattgagattttcaaacctttaacttgtgtaaaacgataaatttctacaccgataaaagccgagataattccaataaacattcccgccgaaccaagattttctgctggaataacatagcctgaaggcaaaccttgtaaaaaagcatttaattcggcatttttactagctaatgcactaattgactctgtaatatctggcatcgaaactggtacaattgtcaataaaaaagttaattcagctaaaatcgcaccactcaagccatccaaattatatgatttagcaagtgaataacctattccaaacactgcatatagcgtcatgatatacattgacattctatatggcaataaaattgctactgcgttatttttaataaattgggtaatgccccaatctgcgggcatttgattatatgaaaatgctacaaccattaataatgaactaacaataattaatggcaaggttgctataattccatcacggatagcccgtaaatgtctttgattagaaagtttttcaagtggtcctgctagttttccttctatcaaattagatatttttgtaaacatcttattttcctcctatttaatcatgaatataaccataaaagcaatcaaactaaatatagttccaacaatccaaaagtttttgcatactcctttttttcgctcaataaaaaattgtgaataagctacgctaaagccacaaacaataccagaaattaaagcattaggaatacgaaaatctatttttaaataatttaatatgtttatacaaatcaataatgacaacatagtcgtcattagaatgaataaagcacttttaaatccaaacattgggatatcataatctgttttgccaaatatatttttatattcttttttggtattgtttttgactacatacttattcatatacttattctcctttagttatcgttcttatagtttgactaatattttcatcactatctttcaatgcttttaggcattcttctttactcatattagttagaccctttaaaattgctatttttacattgttatctgcttcaattaataattcttttgcagttccctcatcaacactaatagcttgctgaacaatatttatagctcgaattcttagtttttcatttgttggctgtacatcaaccatcaaatttttataaacttttcctttttttatcattacagatgttgataacatattaaggattagtttttgtgctgtaccagccttcattctcgtcgaccctgtaataacttcagggccaacaactgcttcgattgggaaatgggcatgttgagatattgctccgtttttaacacaacatattgatattgttgaacatcctagtttgcgcgcatacgctagagcgccaacaacatatggtgttcttcccgaagcagctattccacaaacaacatccaatggactaagttctattttttttaaatcatcaactgctatttctttagaatcttcagcaccttcaattgcggttgtaaatgcttccttaccaccagcgattagaccttggacaagagtaggatcaactccatatgttggcgggcattccgatgcatctagcacccctaaacgtcctgatgttccggcacccatataaatcaatctaccacccatacacattttttcatagatacagtcaacagcttttgcaatttgtggtatgacgtcctttaccgcaattgctactttttgatcttcttgattaataaccgttaaaatttcctctgttgtcatttcatcaatgtgcaaagaattgctgttaatttgttctgtatctaattgacttaatttcatccattccactccttccatatttattatatatctattgaaatattatttcaatataaatgttaaattatttaaaatattatttcactataaacaaaaaaagaaaagcctatattttagaaacaattctttttgtttcaataagcttatctttatttcctgttagatcatttttaaatacaccataatataataaatctgtcattactagtgatgagattcttgatgaaatagctcccattcttatttccttttcttcattaggaacttgtaaaataatatcacttaatttcgaaagtggattaggcttaaattgagtaattgatataattggtacatttttgttttttatcattttagcaatttcaacaagtccctttgtagtacccgaataactaataaataatgctgcatcctctttattcatactttcactaaatgttagttgaacatgtaagtctttattatagattaccttttttccaattcttgttaacttttgttccacatcttgtgcgacaatcgccgagccaccgacaccaaataaatatattgtattagcagcaatcaattttttgattgcattgtctaattgattagtatcgatcaactggtatgtctttaaaacagtattcatatttaaacgacaacatttatcagctaaagttacgatatcgtcattttcatcaataataaaatctattttttcttcaggagcacgtttagactgcgctaaactcattttcaattcactaaaaccgttataacctaatttttttgaaaatctaataattgcagcagcagaggtacccgttttctcccccagagattgcgctgaacactttaaaacatcagcagcattttccaaaatatacttagcaataaccttttcagttgatgtatagctgctttgtgcctcttttattttagcataactattcataataatcttagcccctttctaattaattatatcaatccactagtaaaattactagatttttcaaagtattcataacttagttttaatttattctattttactatattcaaataaaaaccatctatttaacaaaatagatggctaattgtaatattttaattaaataacttagacacataaaggttatttaattaattgtaagatttctgtcttagtggagaattggtttaaaaattcatcataccaattttttatattcttcatttcagcatattgttcaagtgtcggctcgccttttaagaatgtattatcagaatactgataaataaattgtgttgccccatttattgagtaaccacaagttccttgttctggaagatacatatatccagtttttgcttcaagatcgaaagcagcatcaattaccatacattttttattagaaatgacaatcttataagcttcggttgaacttattatctgtcttcccttattatccttttcataattatagccattttctttaattttcgtgaggactgtatcagcatctttttgtatattttttatcaaatcagttcgagtattttggttaaattgaattattgtccatttagctaataactcagaagttaatcccaatttttcaaattttttttgatatgcttcataagcttcttttcttcccttatcattataagttttaatatcttcttcatctacaacaaattctccatttattggtcgtagatatatccattgactccctatatctttatctggatttattttaatacgatcaatattagcaagcgttaatgtattagttacatagtagaactttggatcatctccaacattaaatgccacactaaactccattccagcaaaactaaatttccaaaacaaacctgaattgtcaaagccttcatcatttaaatcattatcttcggcaatcttagcaacatcatcagtagtttctgctttagctgctttcttttcaccacaagctgttaaacccaagcagatcattgataccattaaaatttttataagttttttcatatttttttccctttccctgcttaacttatgaatttattttaatcttattactatcacttccaatcgataaaattttactgctactaatcacataataattatgtgcatgctttatttagtaaaacaaacaatgttataatatttgttcaatcaatttggaaaatataattatttaaagcaaaaaagagacttactatttatttcagttcttatccggtttagggtaagaacctttatttctagttaagtctcttatataagaattaatttgttggatatgttattgcaactctagttaaaataccttttatattttctgtaacaaactcatatttatatccttggtcatctgtatagtgaagatgtccatcagtattttgtcccggattcccaagcattttaaagatatttttatgacttgttgtttttccattcattggtaactcgccattttgcgttacaaaaacaatagttttaatactatgatgattttcctcttcagtgattgtatcataatctaaagtaatttgcgttactttacagtccgaaactgattgctttttatctgtatcattttcataacgaattccaaaccattgccaatcagaatcatctaaataaacttttaagtaagctaccatagatgaaataccaccagcatctaccttaggcgcctcatcaactgatttaccagtatcacccaattctactttagttccaattttttctaaatatttaacatactcgccgactgtttcaggcaaacatatcttttcatcattaatagtaaagtacttaattaatccatttgattccgtaaaaggtctctcttgtttcgtgttatcagaagtattattatcatttggtttgtctgaatcagaatccttagagctacatgctgttacagcaaacatcattgttagtgctaaaccaaccgttaataatttttttagcatagactttctccttttttatttatacatatacaaattttattataaatacttttttcgatttaatctactattttttaaatttaaatcttatattttcttaactattgctattttctgctttcacataaaacttattaattagatttgatataaacttaggccagaatttttgaaacattactagatcttcctttgttctaattcgatcattaatgatttctgtagtcgtagattcttcatgaacacgatgtcccattaacggattattcacaaaagtaaatttaccatcttttaatgacagcttttcccatgcaaaccaatcaacatcacaaacaaagtcacatttaaaaatatctttggatttaatattatcaataacaaaagttactgctggacagcatattgaattaccgaaacgcaatgataatcgtttaccgaactttgtggatgatacccttttactcctcatcggcaataaaagaattcgttttattttcaaattaatattactatatacgttccctttatccctaatttcatagtaatcactaaatacaattaacgaattaggatttttaaggtatgcttttactatgcaatcagaatattcgtaatcataaatatcatcctgatgagcaacagtagtcagttctgtttcgccacatgaaacagcaaaatcaaaatcatagcctattccttttccaggattgggattaactttaatagctaatgaatatttatctgcaatattttcaatatattgattaggggtagaagttgctataacaactttactaggatatttttgattcaaaacagatttaatacattcttctaaatatgatgattctttataagctaaaaccacaaaagtgtgcataaattacctcctaaagggtattgataaaatctgttatttcatcaataattccctgcttatctgctacatattctttcggttcgaaattataagcattattaacagtttcgtcaagcttacttaaatcagtacatggtataatatacccctgcttatcaaacctctccataatttgtacttgatgatcattattttgttccttatattgtccaagacgaggtacaacaataactcttttttttagcttaagtgcagatactatcgcccctactccagcatgggtaataattaaatccgcaatttcaatttgatgatttaattcatcttcagtatagtactcttgaccattaattcctgaataatcaccttttgtatatccccgctgaacatacacttcattctcattaacaaagttagagttaagaattgcatttaagagacgatcaaatcttttatcttgagttccaaacatgacaaatattctcattattttagacctcctcgatatttagcttttggatataattccaacatttcttcccattgaaccaaaaataaatctgcaattggataaacaagctttccagataaagttttagtagtgatattcgcaaacgtttcgataaaaattacttttttgccaaataatttcgcaatgtaacagattggtacagtcgtatgcgcccctgttgcaataataacatctggtttaacttttaaataagccttaaaacttttaaaaatatttatggggaaattacacaaaaacttaaataaatgctccttagttcctgctggcatataccaagaacgagatttattagtttttttgtactccttcatcatctcatgatcttccgtaatcaaaaatgagttgtaccgctccatcagttcacttaattcacacaactcactaaaatgcccaccagcagaggatgtaaaaattactctagtttttaaatcgtgaatattgaaattattaaattcttttaaccactgcttttttacattttgataagaaaaacgtttagcttttcttatagcattattttgcaatgttttagttgttttgtttaaaagttcaactattttatttgccatctcatcaagattacgatctctaataataaaaccatctttcccatcttcaataatatctaaagaacctttcgcactatcgaaagacacacatggaataccataactcattgcctccaataagactagaccaaaactttcataatgtgatgttgtaacaaacacacttgtattattcataatctcatttttagcttcacctactgtatttccatgaaaaattactgaattactaatagctaattgatcagccaatatacttaatgaagctctttcttcaccctcccccaaaatattcaatttagcatcaggattttgctccaatacctttttaaataccctcaacatatcatcataggctttttctttggatagtcgtcccattactgtaatctgatttgtatttaaagaaacacgatttcttgggatctcatcgatacacaatggtaaataaatacactgaggtcctgttaagtattctttataaaattcatagattgattttgaggctggaataaataagtcaaactttttaacagcacgatatacttttttaggatattttggatcacgatctggatgacaatgctcccatgcaattaataatttgtttttctgatgttttgaaaatgctttatcaaaagcgagggtacttgaaataattatatcagcatcatttactttcgcacattgcctaattaagctccgtttctttaaaattattctgaaagctttgtacccttccttgattattttaataaatcgcttattttttagagcatacttaaattcttctttatttggttttaagtctgttgataaatagctaacattaacacgttcatcaatataaaaagatggctcacacaatttatatacacttataatttcaacatcataattatccactaacatattagcaagtgagcaaattgccttttcaattcctccaatctgtaaatgtaatgataatatagatattttttgttttggaccattatgttgactaataatatctttttttgtccttagccgagcaaagctacaagcccaattagcggttctttgcaacctctttagcttatgaacagaatgtttaaaacatgttttatggtaatacatttgagaatcttttaaaactcttagcttacgataatgattaatatttttatcaattgttattgaatgattatgaatcaccttaacattatttaaaacacaagcatgcaatccagcattcttagcttttgcacataaaatatcttcttcatagaaaagaaacgttccttcgtctaagaaacctattctatctattaaggctttttttattccaaaaaaacatcccgaaatacaatctacaggagttgttgctcctttataatatgaatttcgatatttaatcttatttttgaacaacctatttacaataggataattatcatgaatatcatacgcaatcgttctttgtttccaaccacgatttattgtccctcgttcttcaatagttggaccgaataaatgatagttagtatctgcattcatatgtgcaataaaatccattaggtttcgtttatcaataataatatcaggattagaaataatataattatcgcactcttgttcataaagatactttaatcctgcattattaccagcagcatatccttcattggtatctaacgcaattaattcaatatttttcaatttctttagttgttttactgaatcatcagttgagcaattatcaaccacacaaataatatctacagcattaaaagtactgattttttccacaaaatcaattgtctcaattgcatcgttatagtttaagacaacaattcctgttttcatctgattgccctcctacttctctaatcctaatatagtgtagtcataaaatcgagacgttttttgaacttcattattcagttcattaaaccctatctcttccattattgtttttttatcagaaaataaattagttcctaatcccaatctatctccttcaatacttgcccccatcgccactaacattgttggatacatatcaattgtgctgaataatctattcttattattgacaggttctacaacactgttaataaagcaattatatggtgttctaacataatcagtatcaattcccacaaaaaacttttctgacatgctattatgatcaccagtaatcactattgttgtattttcataccattcttgcgttttacaccaattaataaagtcattaatttgttttgactggcattcaatcacattggcatattgatttttgtaagtatttttacattgatcacataaatagccatctggtgtatgagtatcaatagttgtaatttccatattaaatggtttttctccactcgctaacttagtaatatcttttttagcaagctcaaatagtttagcatcttcaataccccaaaaaacgaaataatcttctggtatttcttggttttccttaaaactattatagtctctaattatataattgccatgttgtttatagaaatttgaagttccaccaaagtttgcatcagaaccacacatgaattcatttatatatccgttcgcttccaatacttcacctaatgaatacccaccaggcaaaaaagctgtatcattatcatatttttgactttttattgataattttaaaggaatacccatattttgtgatacttgagaggcaatagtccattgagttccatcaatagttctacttcctccaatgttgtcattgttagaaaaattaatattattttttgctaattgtgacagctcaggtatatagttaatttcctctgcaccaccaaaggtagtattggcatatgtattctccactgattctaaatataaatgaataatattacgcttgccattattaaagctaattttagcagtgcttggatcaacataatatttttcatatatatctgtttcctgtactacgttattaatatagccatatatgtcataattataaatcgcaaagattaaggaacaaacgatacaaacaatcccaaatttagtaaaatgttttttcaatgttttaaatatttgttttcccttaaataacctatggatattaaaaataactaagtcaattattgcgactattcccaaactgatcggtacagtattaataaaccaatctaaataaattccattatcagtaccttccatcggtacttttaaatgaaaaatgatttggtttaacgtctttaccgaaaaagttcgatttccccagattactgaagtaacgatcaaaatactaataaacatgattattgatcccattatatattttttattaatactcttaagcctatctttcatttcaaatcctctttatttatcactttaatataataccatatctataatactaatggtattatattatagatagatatcacagacataattggtattactactaaaagtatttttaccatgttcttttttaaataaaacttactattttgtagacaaatcaataacaaaaagataattgggatataatatcttccctgaacaccttcgattacttcgtaacccatcggtgtccaagctaaggccattgccagcattactataaaaataacaccgaaggaaatcaagaaatataatagtttatgttcagacgtgaatacttctcgatgtgattgttcagctatcgcactgaataacaatatccctaaccaactattgataatccaattaggcattaaaatatttaaccatcctaattcactaccaattgccgtattaatataccaccatcccttttgtacaaaggtatttaaaaataaagatattgtccccggaatgttctccaacattaaagctaaggtataagaaggcgttcccgaccaaggaacaactccggctccagaaaccgattgaatagcacttatggtagtactatcagtaaaagaacgataattaagtaacaagatacatattgttacaatcaaaaagataataattttggtctttttagctattttatcaccattgggattaaaatatttagcaaggattggtataactaaaataaaagcataagctgatcctttattagctagtagtaataaaccacaaaaactgtataaaagaatatcttttaattgtgtttcgttagcttgataaacaaaaaacatcccataaccaatacataaaaacgatgctgcattcaatacagtatcataagataatgaaaacatttgatgacttgccatcggtaacatcgtgatggcaaataacaataatttaccaaaaggtatttttttaaccgcttgatatgtaagaattatataaaaaacaaaattacataaacgccctaaataaaaggtcgtaactacaccaaatccaatgatcctacacatgattattccaatcactgctggaaaatatccaaataaacttcgcatcgaaaccgaatcaacattaatcgtttgataatcacgacccccatttagcttaaagatatttgaataaataaaattataataatcattattaggattagtagtttgcgtattatataactcgatatcagatgccctcattgtcactaagtcatcctgttctttacccattaattgactagctaatgaattagcagaatacatatgcgtccattcatcaggaataacaccaggcggtattaataaggtatagataatgcctaagggaattattaaagtaagaaataatttttcaattttaatttcttttaaataaagattttttattaatctaaacccacttattccaactagagcatagattaagctatatacaatcattattgaagtaggacgatcactaagtatgtttctttgcatgatatataaacaaataagtattataaaaaaaacaatgacactaatccatagtactaattgattactttccttttcttctaaaagagaatttgttgcatgtctcattattttcacctcaaataaaaactagtattagtttaaacgtaagtgccaaataaaatagtgtatttaaaaaagtcgattgaattgatacaatgatcaatttagtcggcttttatttcaaattcttcttttatttcttcactccatggtaagaaccaatccaatttctttggatcttcaaccagatcttgttgaggtaaataatccagaatgaattcaatataatcatatggattaagtttgttggctttagctgtttcaatcaagctgaagactgcagcacttgcttcagctcctttagtagaagttgaaaacagccagttctttcgaccaactgtaaatggtctgattgtacgttcatctaatgaatttgtcataggtacaagaccatcttctaaaaatgaacgcagtcctgcctcgtaattcaaggcatattgtatagcttttcctgtcttagaagctgttaacaccttgttttgattttctttgcaccataaaaagaagtcatcaactaatggctttgatttttcttgacgtactttctcctttttatcaggtgataatgtttcgatttgtttttctatcgcaaacagtctggctattttttcaacagctgtatttgcgagtgtatctgatgcattcttcatatctacaggcaaagcatcatagaacttccgtctggcatgcgcccaacaataagcattggttacaccatctatatggttatatccataatagccatcagtaatgatagtaccatcaaatcctttcagaaattcttgagggttggttgcttttctgtcaggtctgtaatcaaatatcttaacaggtcttttactttctttgatacttgaatatacccacatatatgatttagaagtagccttcttacctggttcattcaatacctgaactggcgtttcatcacaatgtatatgtgattccttcatcatcagttcgtgcatcctgtttaccaatggaatgaaatattcattggcggcaatgatgatccagtttgccattgtcgttcttgaaagtttcattcctaatcgtttccattctgattcttgtctgtatagtggcatatgatttacatatttatcaatgattacttgtgacagtacacttggcgatgtatatgaatgtggaacaaccggttgaggtgtgccagctttaagcatgactacctttcctttttttctacagtttcgacattcatatgtttttcgataaatatcttttacatagagtttggctggttcataaataacttcatgtcttacaaattcctcacctacataagataatttagagccacattcatcacatactctgtctttttcatcaacatcataaactttttttacatgttttagcttgtctaatttgatatcaattttctctttttgtttctttttggctctggtatatgagatatcttcaagcagttcaggttcacattcattttctgcttcatcaaaaagagaaagctgatccatagaatgtgttatcttttcactcttggtaccaaacagctttctctttaaataggcattttcttcacgcaaaagttcattgttgttttttaagtattcattttctgctttcaaactgtcaatggtactgttcaaagatgcaattgtagctttcaattcttcaatagaatgtgacagattagccattaccaaagctaaattttcaactgtacctgtagtagaatcagccatcaaaagcacctccatttcatacatccattataccataaacaggcatattatcctatgaaatcaaggctttacagtacaacttgtggataacttttctgaatggtcttaggctgtacgatagaaagtccttcaagcagccatctgaattgttgaggggttatttctcgagcttctgattcatctctgggccatttaaatttaccattttcaagtcttttataaagtaatacaaaaccatcaccttcccaatacagagccttcatggtccttgtatttctaccacaaaacagaaacacagaattagaaaaaggatcaagcttgaagttctgttgaacgatagctgaaagaccatcaatctgtttacgcatatctgtatagccaacagctatataaatatgttcggcttttgaaatatcaccaatcataatagtgacttcaaaagaggctcaatactttggtaaggtgtatctgaatcgagttcaattttgatgcttcccttgataatgataatcttttcattattgtgtggttgcttttcaacagaaacaaaggatacttcattcttgtagctgttttcatttatctgatcacataaaatatttctgattttttgttgataattataataagtcgacggcttgatattgtttttgtcacagaaatctttgacagataaaccactttccttgcattctttgattttaaaataccaaaatttatatttttcattttcggtaagttcctgtactgtcatatagtctctcttcctttccatatagtttttggagaatataaaaactacaatatagtttatggagtctccacattctatattgtagttcttagagttctatatttttatccactattttatttggcgcttacgtttaaactaatactagcattttcatcattaataatcaatttctttcaaatatcattagcacgcaatcaaagaattgggttgacagatattttgttattcaaactcttcgctaacacatttcaatgcttcagcaattacattatgcatatcataatatttatattgtccaagtcgaccaccaaaaattacattttcttcttcttttgcaagtaatttatattttttatataattcattatttttttcatcattcattggataatatggctcgtcaccttttttccaattggctggatattcttttgtaattactgttttttcttgttttccatattcaaaatgtttatgttcaataatccgtgtatatggaacttcatattcggtataattaacaactgcattaccttggaaattctcttcattcaatatctcagtctcaaattttaaactacgatactctagagttcctaatttataatcaaaataccgatcaatcatcccagtgaatacaattttattagctatatcctttagcccttccttgtgatcaaaaaagtcacaatttaattttatatcaattccttttagcatcttttcaataatttgtgtatatccacctattggaataccttgatataagtcattaaaataattattatcataagtgaatctaactggtagtcttttgataataaatgatggtagttcagtgcataattttccccattgtttttgagtatatccttttattagtttttcataaatatcttttccaactaaagaaatcgcttgttcttctaagttttttggatctaaaattccagactcttgacgctgtttttcaatcatctcttgagcttctttaggagttttaattccccataatctactgaatgtattcatattaaatggtagattgtatacttcatctttataaaaagccactggtgaattagtatatctattaaactctgcaaattgttgaatatattcccatacttctttattagaagtatgaaatatatgtgcaccatattcatgcacgtttataccttctacttcttttgtataaatatttccagcgatatgatttctcttatcaacaatcaagcatttttttcctcttttattggcttcatatgcgaatatagagccaaagagacctgcacctacaattaaataatcatatttcatcatacttttccctttttaactttctctatttttaatttcttctatagcattaattaaaaaaccaccagacagtactttttgttttattttagctacactacttcttaattcattgtaaccagcatcattaatattcaaaatgatactttctatttcacataaagaatcaactacatatccgatattattatcttttacaaattttgcaaccgcagcctctttccaaactattactggtattccacaagcaatataaagagataatttatgaggattattatacttagtatatttacctagtattcctgtacatctatctaaactatcaccatcccaaattaagccaaaccctgaatttatatgtgttaataattcttcgggtttgaatgatccattatagtgagagaaattatcattgtttcctgtataattcacaccatataattcataattatacttacttgtcttcaattcatttagtttatatagatatccagcctttgtgttctctaaattacctgctaccacaactttattatttgtatcagttttttttaaatcagtttcaatattgtccgcaatataatcgaataaatttaaattaactattttcttttcacttattccttgatctttgataaaatcagtcatagcatagttatgtgaaataatgtaatcaaaactatctaaataagcaatttcattccttatcattttagaaaatcttccttttttaaatctaccaagaaatttgtcaaatcttaattcatccaaatcatgtattagtattattgtggtgtaatcttttctcttgcttatttttttgataaatttaccaaggtgagtagaataacagattaaagggtgttgtattaaaactagatcacctttcttaaatgtttttaacatttttttcagatctctagtttcatgaacaaacatattaagtaatttagagatacctccaccatatgaataatttaaactcttaagaatgaatcctttattagttaaaatatgatttacatcatctctagctttactgccagcatgattttcatgcaagcttatctcatcgattacataattcattggtctttctcctattacttatcaatttctttcaaatatctactaagtgcatcttgccaagttggtaaacgattaaatccattttgatcaagcatttccttagacattctactattatttggtcttttagctttagccagaaaagcattagaatcaactggtgtgacttcaatctttaaacctgcttgtttaaagatttcacacgcaaattcataccatgaacataatccttcattagtagcatggtatattccatatttatctgtttgaaccatagcaactactaatttagataaatcatatgtatatgtcggtgagccaatttgatcattaacaacactaactgccccacgttctttacctaaccgtaacattgttttaatgaagttatttccattaacaccaaatacccaagcaattcttacaataaagtgttttggtaacgtttctacaataagttcaccttcatatttagtttgaccatatacatttaatggatgtctttcgtcatattctttccattcagtttcaccttgaccatcaaatacataatcagttgaaaaatacatcattggaatatctaattctttacatatattagcaatgtttctagtaccatcaacattaactttagtacataattcaatttcatcttcagctttatcaactgctgtccaagcagcacaatgaattatggcatcatagtttccttctttaatcacttctgctactttttttgcatccgtgatatccatttcttcaacatcaacacctactgcttcaatattttgttctttacattcattaacaatatcatgtcctaattgacctttaacgcctgtaaccaataatttcattatttctcctccgatatactctttttctttaatagtaattttaaaagaatttttaactcattatctttagataatgctaacaaaatcccatatatacccactgatagtattacttggattaaggtagttagtggcgaactacccattttaatacctatgaaaacagatattgcacacataatacatgaataaagaaaatatttaaatgattttataagtgtagataatactttaattgttcttgacatatagtaatattgaattccaacagaaatatattcggcaattactgttcctagagcagcaccatagcaacccattgttggaatggtaaaataatttattatgacattgactaaagctgcaatcacatatgattttattaaataattagtttggtttgttgcaataaaatattgatttgcagaaattcctgataatgctaaagcaacaattataggtacaagccatataatcacataacctacttcaacaaattcacttcccagataccatggaattaatgtgaaaccaattgatgctaatcctaatgccattggtaatgatatcattaaaactaatgaaatagtactactgattatttgttttatttcatcaattttacctttgataaataagttagcattacttggcatcaagactaaattaatcgctgttataacagaaagtggaatttttactattttttctgcattatcataaaacgtaacactagatatattagtagtcagcgattcaatcataattttatctacctgagtatatactaaagtagctatttgcggtaaaaaaactttaatcgttggtaataaatgtttttttaactttaaattatttacatccttaattgatatatatttctttaatcttcctactaataaaaatgagcttacgacttgacacactccgataatgtataaatatatatacaaatcatctggtgtttttactagtataaatataaggcatatagtaataattttaataataaaatttctaattgtaattaatttaaattcttccataccattgaagaaccatgttggatcaataaaattacctatcagccagataatagcacataaaaaataataactatattcattattttttatatagaacaaatataaaagacttgtaactattaacataaaaaatcttataatacaaatttcaaaaaaagtgcgcgagagatcacttttactattatctcttacataagcaatttcacgtgtaccataatcatataaaccaataagtcctatagttgaaaataaagttaaaacagcttcaacatagctatacttaccaagattagtagcacctaataccctagataggtaaggagcggtaattacaggtacaataactaaaaatatttgataagtggtattaaatagtatgtttgttagcttcttttccattcgttggctcctttaagtataacgaccaaatatataaaacagttcgtataaacgtattatgaaaaaacttatatttcaatactatatgcattttactaaccttaggatttttttgatatagtttaaaatagtcctcaagcattattttatcagtatcacttaatttttctttatatatattataaaaatctcttacaccattatattgtaatctaccatgtgtatagaagttttccataacagaactatatatagaaaaaatgtttgatttttttaacacacttttaattccggttatagataatttaactcccgctccagcaacattactctcatgttgtctatatgcatataaagactcatcaactttttcaacatttccaaaaaaggtagcacacaacattatccaaaaatcatgaacataacactcactaggtattgaatgtatgattttctttaaatcattatcaaataacattgccgcacctggaacatcattagtaacaagcatataacttttttttccccgatatcttagttttgcatatttataaaacgaatctgaaataatacttaatttactatctacaaccctcgcatcacagtaaacgacattattttttaactcatttgcattcattaaatgtatcttatctaaacttttttttattttatcactatcccatacatcatcttgatcacaaaacatataataatctgcttcatcaacatgatcaaagagataaataaagttctttgctgcagaacctttttttattttataatcgattattttaattttctctggatattttttttgataatcacataatatctttaaagtattatctgttgacatgtcatcactgatatagattttaaaattttgaaaactttgtgataaaatagagtctaattgttctgaaagatacttttctccattatatgttgccatcattatgttaactgtttccatatttactatcctttttataaaaacatttatttaatattctaacaaatattttacctgctttaattttttcaaataaaataacaagatttataaatacgtttactttaattatttcctgtttttcccaacaaaaagtaaacttatatccataatttttaaatatttgttttattgaagaaatattatatgaataatatttcttcaacttatcatattctaaaaattctgcttgttctatcaaaaaatttgaaaataattttaaataataatactttacgattttactatttctatataaaaattcattcttgttttttataaatatatcaatgttttcaatgattttaggaacatcatttataagtctgtccttattttggtgagttattgattgaacatttattaaattattatagcctacatagtcgattatttttacttttggattacatgctagacaacgcattgtataaacaacatcttctccataaagtctaacatttggatatttaatattattagtatctaaaaatgatttcttatatacttttgcccaaactgtcgcacgcttatatttattccaatcgttattttcatgaacatacgtaaactctgtatctccattttcatatactctccgatatccgccaataactatttcataattatcagccacttccataaacttttcaagaaaatcacagtcgaaataatcatcaacatcaaggtatgttacataatctcctgtgcaataggataatccaagatttctagtttgtgaattaccaatattagaatgggtatatgcgaatacattatcatattttttttcatattcttttaatagttcaaatgaattatcagttgaaccatcatctaataatattatctctacattttggtatgtttgattgattaaacaatccaaacatttttttataaatttaacaccattatacactggaacaattacacttatttttttcatagccatctcctattttaattcactacatattttctaagtacgagcttataatatatcatgtctttgagtatataaataaaaatatttttattatatgcagattgcacattttaatgaataagtatacagttattctattaaaaaaactctctccttttggataaccatattttaaatatggatttcttttatataatggatatttctcctctaaccatttaaaatttttatccaattcctttaatattagggaatatttacttcctcttgtagcatataataaaaaccaaacaattaattttacaaaataatattcgatataatcatcgtttaataaattcttttcagctaacactccgtatatattattaatcaaataatcgaattgtaaattgtttttcaaatttttatgagctgtgtttgatacactttctttattataaaaccaattataacctatataatctattattttgattttttttgttaaagtaactgcttgtattgtaaaatttatatcttcaccaatattagaatttaaaaataatatgctattgttcttaatatactccaatttatatatttttgcccatgcagcaacaattcgatattttgaatattctgcatcacatataagttggacttcttctataatttcacctttagtattaggtcttcgatatccacctataaccacatcatcatcattttttgaaatttcatcaacaaatttctctacataatctatatctatataatcatcattatccataaacattaaataatcacctgtggcaagttgaatccctttgtttctagtcaatgagaccccaatgttttcttgatggtaaggacaaattaaacctttatacttatttgcatagttatccaaaatatcacgagaattgtcacttgaaccgtcgttaattgctattacttcgatgtttttataagtttgattgataattgcgtctaaacatctgcacaaatagtcctcagcattatatacaggaataataattgaaactttatatttataatccatatactaagcctttctgtctaaatcatttatttttttcttcattaacgaaatttcttgtatcattaaatttatttttgttgtttgtcctgcaataatcaccgtcaaagcaataatgattaaaaataaaattacaaacaagaaaccagcagccaaattagatattgtttgaaacccaaacatagaagcaagagaaacaaaaactttaggaaatagcgcaagaatgattattgcaaaagcaggaatataccataccagtgcgaatttcatcgaaattctgccttttcttaaaataaaagtgacaatcaggaataaaaatattccgactaatagcaatcctgttattagactatctgacatgtttaagcctccttatcccaactactaaaatagacaaaatcacattgatcataaaatatatagttttccaagaattaattgaagaaactccaccttctcgttcattcattgaaacaggaacttctttaataatataattcttttttaaaagttcggtattagttattggttcaggataatcaattggatatgattttgcaaaatcttcgataactaatctaccagcagctctaaatccagaggttacatcataaatctttttacctgaaactagttttataaaaaatgaaattattttaattcccatttgtcttgctagggttgatttaaattcactactactatcatctataaatcttgacccaataaccagatcagcttcaccatttaaaataggtcttattgtgttttctacatattttacatcatgttgcccatcgccatcatactgaagtgcaacatcataatcattctctaatgcatatttatatcctgtttgtactgcaccacctattcccaaattatgtattaatggaattacaggaatgttattttccaaacatatttttagagtgctatcagtagagcaatcatttataacaattacatcatatgtagtattattttcagtattaaatttttttattttattaaatgctttaagaatatttgcttcctcattgtatgcaggaataattatcaagattttttccattataattttaatatcctttctactcatgattcttagtattaataagaaattatttattgttaaataactaatacacaaaccaactaagctacatgtaaaaatattttgtcgtatattctataaacaattggattaccaaggcttagtctctttagaaaaatcaaaaatcatttatagaaataaagtacttaaactggtctatgaagtaaaatcttataataagttccactgcaattaacatctaatttaagaagtttgaatttacatgtagcactattaagtaatttatttataatattgcatatgtcactattttcataattcgtcatttcatagatgcgtaatagactattcgaacctaatatgtaaatgataccaatataatttttccattatactgttaataattttcctaatatatttatgatagtaacacattgaagtaatattacaaatataatgaaatattggttacaattataattaataattatttttctatttcttactactagtactaaaagcaataatactggcaggaaatatctaccttgcacaccctctataattggccaacccaaaggagtaaatgcaaaagccatagctagcatggaagcaccgcataccgctaaaaaagaagctatatatattaccttatgaatcactggaatatctatatcatctctatcagtctttaaacttgctccaaataaagatataagccaaataataaaaatatttttagttaaaattagatttaatgatcctaaatactgtcccaaggttgtgaatacatagtgatcgaattttttaactattgttctaacaaataaaatgattgtttccttaatatttgaaagaaaatatgacatactataactttctgagttagcccatgaaactatagatttttgagaaacattactaacactgctctttttagttaacaacggtaccccaaacataactgtaacccaaggaatcattaacgttacttttgttaatattctctcttttttatcatttattctttctttacttattagtaatggtattaaatttaagacaaaatatattcctgttttttgtgttattagtatcgttgaagcaatcatatatactaacatatctatctttttaattttcttagagccatatacaaagtcaaatccatagccaattaccaaccaagcactggacaatataattgtatcatacgaaagagaaattgtttgatgaataaccataggtaataatgatagtacaaataaagcgttttttaatatcggtatcttttttattgcaaagtatgcacaaaaggcataaacaacaaaattaccaactcgtgctaaatagatagttaaaatcccacctatcgataatagtctgcatagcgtaacaatgatgatccctggtaaatatgatatggcattactagctaatgtttcaccagttttaatataagtatctgatgtatcattttctattatcatttttcggtaactattcaatgtttttacagaaggctgagtatcgccgataaattgctcacactctctgattgtgatatcttcttctgttcctttagataatagtatagatgaatatcctaaagtactccttatatgtgttgtttcatcaggaatatttccaggggtaaatgttataaaataacataaaccgaaaagaaaaataacagcaataaatattttttcatgatcagctttttttataaataccaaataaaaaccacttataattacaatatctactattattaaaattattattacgtatttccaaacaaagtctggcattgtactataaatattataggctagtcttatatcgtcaatatcttcactatcagtaatccgagttttaatattctcgtttgtactaatattttctaatactatagttacattctcatcgttgttattttcgttgacaaatatcttaaatccttgagatggtgtttttggctctatttctaactcttcttcttttaatatgttagcattgtcatcatatattaatgcttttaccgttccagaatttttattatctgcattttgaaccgtgagtaacacagatgaaagtttcgaatcatcactaacaaaatgataactattttcaatcttatcaccaatttgtaaagatgcccatcgatctttaagtattgcatttttatcaaacaatacatcactttgcatttttggggatatataaatatatcctattaaaatagtggtaacaaaaactgcgatagaaactgttgtcatggcaagttttttgttttgtttaatctttttaaaaatatttttcattaatatactccatttataattttgttaaaaaacaatactactcaaaacttttttttgatagtctatctattctaccaactaaacctgctttataatctctataacctttatacatatatgttaattttcgatatttatctttttcaaataacaacactttcaatgcttctttacgggtacattttttttctaattcacaatattctgggaaatcatttttataacgatcataaaaataatgtcgattacgaaccacatagtatcttcttatataattatgattatctaaataaaatacttttttaccaatttgtctacgtactgtgtcgcctaactcatgttgtaaaacagcatcattgatttgcgcaatctcatatcctttttttctcaatgctaaacaaaaatcaaaatcaacacagtcaataaaataccattcaggaaatcctccaacatctaaataagcctctaaatttagtaaatttcctgatgtcataaccaatatcggataatcaacaccctccaattttattccttctgttcttttagttgaatgaaaaggagagacgattcctaatttctcattagtcttatcagaattatttatatattctttcattttagaaatagcatctttttcaaaatgactatcttgatccattgtcaatatccacttatatttattatttatagcttctttagctccaatatttaatgctgcagaaatacctaaattatcataattaggtatatattttactttattatacccattaaatatatctccattatttttactagaattatcaacaacatatagtacatcaagttcatttatataagtatcgatatttttacaaatctcttccctttgaggattataagctaccactacccctacatacatattttcctttctccttctattttattatttttctagaaactttttttagaacttcaggtaattgaattctagagactaatttccatcttcttgagtttaatatctcatccaattgtggattatatccaatatttcgagcttcctgacagtacgctatcagttctcttaatgattgtgcatcaaattttgctatatcttttttgtataaaatactatattcatctgtcatttcgttaattgatttaatgttgtacttatttaaattatcaattttaattttgtattcttctacattttcgcaaatttcaacaattttatttaatatgtctttattcgttgaattaacattgactacccatccaaatttatgttgttgtattctttctgcgacagcaccaatatccaaagctaaaactggtacaccactagatattgtttcagttaatgtatatgaatatgtttctggccatattgataaattacacaccaaattaatcttattttcttttaataaattaggtagttcatcacgattatatctgccatgattaatataaatactagtatccttttctaaggtcttaaactcagaagtaccaaataaatgatatttaatttttttacttttcgtattattaactaaatattcaataacctttgcacctttatgttttgccattactcctacaaatgcgacattaaaattagtatcatgattattaaaatcagtatatagtttttgtaattcaattccgtgttcaatcggttggcaatttaaatttttataaacagattctactatttcttttgttgaatttgaaggtgttattataatatcaaaatctaataaaaaatcattccatctttgttgccatattggtactatgttattagctattcgcatcttattatataaacagctagcacaatcttttttagcaggctcaatattcatacaatacttttccattttgtatagcaaattgatagttggacatatacaataaaaatcatgtaaagtaatcattgttttaatattattttctttacaaacgtcaataacgtcaaaataatgacccatcatgtgatgtatgtgcagtatatcaatttgtagtcctttaatcactttttttacgatgtttttataatcgttattataataacttaacgcactaaatgttgttactccatccagtatcattatattttcttcattttcaaaaaatgaatgtactttatatactccttgactagggtataatacatgaaaattataactttttcgtaatttttttattatatccatacaatgaatagtagttccccctagatttgtagtaggattgtcaaaatcatggattaaaaataaaatattttcacgacctcttaattgaatattataagagatgttatcacatattttttttagtgggaacgctttgcaccacaaatcgattttttgaacatatgcaggataccgatcatgtaatacttctagattatgtttcaataattgtgttttatcgtcttgaaatgattgactttctttatgtaagacaattacttcatcacataccacatttctgaacccataatccaaacatctaaacgaaaagtcattttcttcaccatacccccgaccaaatttttcttcatcaaaaaatccaactatatctaatacttcccttttgataaacatacaaaaaccatgagttgtcggtaaatccgggtaatctaaataagaagcctcagcaataatatttgcgtattcttcaaatgaatattttgatggtaattcattaggttgcaaaccttttggtactgacactaatgttgcattatttgatagtgctgtaactgtggcaatagtcttatcagaatacgcacatttttttatccgatgtaaccactcatgaggaacttcagtatcactattaagtaacaagacatcattatttgaatatttcattcctttgtttacagttccaacaaagcctaaatttttttgattatataaaatcgtaatcttgatatctgtatcttgatatttttcttctagattttttaaataaactctaacattttcgtctggacttttatcatcaataagaattagtccattattatttaagtcagtatttttaataatactatctacgcattcttttagacaatctaacgcattatatattggaataataatgtcacaatatttcattctatctctcctttatacttgttcagcaaatccacgttctaacttcttgaaaatcatataccctataatacaaactaaaactgatattacaactaaaatcataattgtttttattcctggtaatatatgatacataaataaatctctataagaagttaaaatatgagtcataggattcaaattaagcaacatagcaaaattagccggtaaatccgtcgccgtataaaggattggggtcgcataaaataacatattaagaacaaactgcacgatgtattcagtatcttgaatataaatattaatcgcactcaaagcaaatactaagccaagggtaaataaaaattgaataactgcaataactgggacaagtattatatgccaagaaacaccaactccgctaaaaacacaaaacactaaaataattagacatgaaataaaaaaattaacaagaccacttaaaaccactgatatcggtaatatttctcttgggaaatatactttcttgatgattccggaattggcctttatcgttgtcatcccttgaatcattgatgtcaaaaaaaagttccacgggataattccagtaaccacaaaaatcaaataattatccatatcattcttcataataattgaaaagacgatagtataaacaattgtttgtaataaaggatttataaaagaccacaatacacctaaaaaggatcctttatattttcctcttatttctttttttacatttgattttagtagttcacgatattcatataaattttcgaataatttcataatatatctccctatatctaaatcttagagaatttgacttctttttcaacaatgtcaatttcatcgctatcacttattacaacctttatcacatgattccccgctgataattccttagtattaatatcaaccatccaaccaatttcatctttatttaaatcaacatactcatgttgatatgtttcataaacatcttttctagtttttctaataatattgtgatactcaatatcatctataaagaaatgcaattttgaattaggatgatcatttatttcccatccttcaataattaatttactttcatcattgatagtggcaaacgatttgggcttttcaataaataaaatagcttttgtctgaatttctaattcatttttgtcaatttcaccttttttataagcttctctttgttgttttaaatactcattgataacatatgaaggatgtccatctaaacgaaattcacctttatataaccaaattgctcttgtacacagttctttaacagtacccaaactatgagagacaataacaattgtcttatcagtatctcttagttctttaagtttattaaaacatttttcttgaaaatgctgatcacctacagcaagaatttcatcaataagtaatatttccgcatctacatttatagcaatcgaaaaagctaaccgcatatacattccagatgaatatgttcggacaggattatcaataaattcaccaagttctgagaactcaatgatatcatttaaccttttatcaatatccttgcgacttaatccaaaaattgatgcattaaaatagatattttctctaccagtaaaatcaggatgaaatcctgccccaagttccaataaagatgttagctttccatttgtttctaaacttccattttcaggatatagaatttttgtcatcagttttaataacgttgatttaccacttccatttgtaccgattagcgctaccgtttcacctttttttatatctatatttatattttttaaaacctcatgatattctacgtcttttttcttaaatacggaaactagactttcttttaatgtcgtaggtttatcatattgtattttaaatcttttgtatagatttcttacttctatagcattattaatattttccatttacaacacctctagtgtactatatcataaatagtgttactttcatataacatatttttagcatttatttattatttttaaaatactacattttaatatataaacaaatttataaattctaaggatagtaattttacatattccatgttggaatagtatgtattatataccctcgataatatactgtgatcacatataaaatcataataataacagttatcataactgctattgtctttatattttttttaggtagccgtatatcatacttatatcctatattttgtaccatcggggtgaaaaatagcaaaaatggatgaagatatctacctcctatttcacttatagcagaaattggacgattatgcatcaaataatatgccgaatatataccaatccaattaacaaagaaaactgtactaaatccataaacaataaacttatcccatcgatatttagtttccgaagcaattaccaaaaacaatattataaaccaaataatattaaaaatatcaggtaaaattgcaggcacaacactaaataactctctcccttttctacctgacgtggccatgtttaaaaaagaatcaaagaaaactcttatataattttttaaatcaaaaatatcattcatgacaattatgattatccctaggcaaataattgatataaatattaataaatactgtgttcttttattaatattttttaaaaagatattaatcattaatatcaacaatccaaataaactaaaaatataattagtttttgcaaataaaatcattattacagtaaacagtgtatagatattttgtttttttgttatatcttttatgcttttcaatttactaatattaaatagattaacaacaaatgcaaaaaaagctacataagaatatacatcataacttggactagcgattttttgtaaaaaggggattgaaaataacatgaacaaactaacttttgcaactttgctatactttatgagtatcgaacaacttaccgcataaaacaacaaattagataacctagataaacataacataaaaccatagctaggatatattagtctagctaataaaactccaattgctgcaggaaaatgaaataaatctacatttaatatacaattattattttttgtgactttaaaagttatctcatcattttttacatcttctaaaatactataattaaaatcatttatatcaatgccattgccagatattgcttgcaattcatatcctcttaaaatttcttcactcattgaaaaaggtttttctaatgaaaacacctcataagctttgcttaaatgatatccttcatcaccattggataaaggatatgttaaaaatgtagaaaaacaaccaaatattatcattactaaaaagaatatgacttctattcttaaatttttaaagtcatttattttttcttttaatacaaagcacatgaatctatttgcctttcttaaatctactgatttttcttaatggataggtaatcttccaagatattgaatttaacatattggttagttcgttatgatagttatttaggttatttcttaattctatattttcactaatcaatttttctttttctattgacaaattatgtatttttgtttcattttcaaaaatttgccgtcgaagagaatgatcaaaaaaattactttctctatataatttataatattccttcaattcaaacccatatatatcctccaatatttctacattattaatatttttaaatagttcctcaaatttttcaatccctaaccactttatattgcttcgtttgtcactccctaataacaaaaatgccttttcaatatctaattcaaagtcagttttagattttttatttttgaaacgttcttgaaaaaaatcaataaattcttgattattcattatatcaaaaaaatgttttctaattaaagtatgtacattataaaatgctatttcgctttttgtatcattcccactaatcttagtatccgaattttcccaacgataatatgttagtttttcttcgataatataaatcggtgccttaatcaataatcgacaccataattctaaatcttgggcaggtacataagctatattatatccatttccaatttgatcaagtgtttgcttacgaataagtgctgatggattacacaaacaattcccttcatcaaagaaataattaagccattctttttgtgaacgatttggcgcgtaattaaaatgatttaataaatcaatattactattggatatatcaccactttcatttatgatttctactctggaaaagcaagcaccgtatttaggattttcatccataaattttacttgtttttctaatttatcttttgcccaaatatcatcactatcaattctggctatatattgacttcgtgctctagaaaaaccaacattagttgtgtaagcaacatgacgatttttatgttgatagagttttattattcgctcatcctcaaatgaatcgataatttttctagaattatctgttgaagcatcatcaacaataattaattccaggtcattgaatgattgatttaagacacttttaattgcttcacctatatacttttctccattataattaggcattacaacacttacttttaccatatatttatcctcattaatctcttttatataaatctcttgtataaatcttttcttctacatctattaattcatcattcattcgatttacaacgattacatcacttaatgatttgaatttattcaaatcattgattactctactgttatagaatttatcttcttgatacgttggttcataaacaattacttcaattccttttgccttaatccttttcatgattccttgaattgatgaagctctaaagttatctgatccggttttcatagttaaacgatagatacctactactttaggatttctttcaagtatcataccagcaatatgatcttttctcgttctattgctttctacaatagcactcatcatattttgaggtactttatcatagttagctaataactgcttagtatcttttggtaagcagtaccctccatatccaaatgatggattattgtagtgattaccaattctaggatctaatcctacaccttcaataatttccttagtatttaatccccttacttctgcatatgtatctagttcattaaaatatgatactcgcatcgctagataggtattagcaaacagtttgattgcctccgcttcagtactaccggtaaataaagcgggaatatctttcttgattgctccatcttgtagtaataaagcaaattcttgagctctttcactcttttctcctactactattcttgaaggataaagattatcatataaagcctttccttctcttagaaattcaggactaaatataagattattaacactatatttaattttcattttctcagtaaaacctactggtattgttgatttaataatcataacggcttttgaattaattaatttaactgactgaataacatcttcaacactagatgtatcaaaataatttttatcagcatcataattagtcggcgtacatattatcacgaacttagcatcctttaatgcttcttctttgtctgtggttgcctttaaccgaaggggcttatttctcaaataatccgctatttctttatctcttattggagaaattttattattaatcatttcaactttacactcatcaatatctaacgccattactaaattcttttgtgatagtaatacagccagagataatcctacatatcccgttcctacaacagttatattcacaatcttccttctttcttaatcataacgaaccttttccataaacaacacttttaacagttttatacataattgtaaaatctagccatattgaccaattatgataataatagtcatctaatttacaccgataactaaactccacatcacttcgaccattagcttgccacatccctgtaacaccaggttttaatttaataattgaatcataatattgacccatatcctctttttcacgtggtaagtatggtcttggccctataaaactcatttcaccctttaatacatttacaaattgtggccactcatctaacgaggttttccttaaaaaatgtccgactggagtaattcgaggatcatcttttaattttttgttagttaaatactcttcttttattttaggatcctcttccatcattctttcaagctcagcttcggcattaggtatcattgatctaaatttatatattttaattaatttcccatttttcccaatccgttcttgtgaaaacatgatattgttatggtcaccgctcttaacatatttatatttcacataaaccattaatggcagtaaagtcatcaccccagcgataccagctaatacatcaataaaacgtttaaaaaaccgatccaataaactcatttcatcattggatgtggcaattaataattgcccatcaaaatcctgtacttcagaagaaaatgtcatcgttccattgacattcggtaaatatttaactgattctacttttccatatatatccgccattactttatctaatacttgttgattggcttcaggtaaagcaatgattatttgctcaatcttttcgttcttgatcgcttcatctattttagcataatcgtatacaacagtatgtttaatgatattatcttgtttaaacccaaataattcatctgttttattaacatcaacatatccctttacattagttaaagcaaagcgattattatttgatatcttccctaatctcgcggcctcatatcctgttccaataactaatgtttttcttgcaaactgttccctaaaggcaattcgaagaaatcgcgatgctaataaactaatcaaaaacattgatattgccattaatgttaaatgcattcttcgctcataaccagtagattgcggtactaacactaataacgctatgtaaaaacaaaaactagatttaactaattgttgtatttcattccatatcaaacatgtattcaatgaataatgtccataaataaacaaaaacaaaaaatataatgttcccgaaccaataatcagatcaatatccatatgaaaatacaaacaaataaaataatacatcactacctcaataaaaaataacatgattggcattaattttctattcacactcacacctcgacattcatagaacaattataccctaatatcctcattatttctatcttttatcagtttaaacaactaataagattgtttaaactgataaatattgtataataattatatactttacgaggaggttactcatgaaattcttttatacaggattaaataaatttatgtggaatcattcatttatcaaatcttgtacgcattttgcttcaagattttgtccatatatagttgcaatattttatatattattcttagtgaaaataattttagatcgaccaaataatctcttaattctaactgccgaaccaatcgccgtctttactgttacaactattttacgactcgtaacaaatcgaaaaagaccatcagaaaagtataatttgattcccattgatggcagtaaaaaaaccggtcactcattcccaagtatccatgttgcgatgtctatatcaattgctttagccgtactgcggtatggaccaaatatgggactgttattatcagtgctcgccgtttcgataacatttatcagacttgtttctggtgtacattatatcagtgatattattgccagtattttaatcgcatttatcattgatttaatctaactacaccatttgtactgaaagtttatcctcagataacttgtaaagattagctatcgtgtatcatgttaactattcttttgattaatcagactagcatgtcataattattttaaagaaataggaattgatcatatgggaattagaaaaaagattgttgatggtgtttctgataatgtattgactgatgaagaattaaaagatcttgtcaaacaagttgagctaaaaaaagaattgcatttacaacatgataagttaataaatagtgaagttaaaacaatatattttgatgatttttcaaagaaacatcgtttaacatataatagttgcaaaaaatcaatgagataaattatgaatattagctaaaaagcatgtcattttaaattaacttgctttttattataatgtctgatcagtagaatcccaagtttgatttaatggaattttatgaagtgttggtttgcttaaaggatcgcttccataaagaatatcaacccaagtatataatggacaattatcataattctatttagcatcgccacaggttaaccggacccaaccaggaaaacaagttattatacatgcttgctgataggattcgattattcatctttttataagaaactgaatggaataggattccatttactatttgcgtcgaaaatcacccatagctatgactaattaaagcgcgccaacgatattggaaatgctgatgttttttggacttttttattatcataaaccaggtgggttcatgaatcctaatgattctttaattctttttgtattgtaccagttaatatattcatttagcttatttataaattcatcaatactggtatttgtctagtcttgattataaaagaagtcattctttaatcttccaaaaaatccttcacatgccgaatcatctggtgaacagccttttttagacataggacgggtaagcccgttagtattcattagttcgatccactccagacaccgatagtgccatcctctatcactgtaaataattggcttctcattattcttaagattagttatcacatctttcagtactgtatttactaaattactattgggtgaaagtcctattatctacgataatacataaccattaaaacagtctatcattggtgatagatatactttatcaccgtttatagcaaactctaccaaatcagtcagaagtttctcgttaggtttatctgacttaaagcttctatttataaaattaggaaccctaggacttatttctcctaaatatgagctgtattttcttttcttaatatttataacaaccaaactttgagagttcattatatttctgacaaccttcttttttaatgaatgttttattcttctatatccatagctttgatatgaattactaaaaaaatatttcttatcctgattttaatatcaatgcccatttcttttttaataattcagatacctttataccttttctaatatattttcccatagttaatcgatatatatctttttttagtttttcaatttcttcttttaatttatctgtctcatttgacctgttcgattttttatcattaatcttatcttctaattccgctaaaacaagattatttttccagttatataatgatgtcctggatattttagtttttcctaaaatatcactcatggtttcttttcctacagccacttctaacgtagcttccttcttttcttcctgaaaatattgtataaaagattttccttttaaggaatagatttgtgatttttaatatcttcgcataaccagttagataaaaccggtctgcatggatagcccagctcttttactgtaagactaatattttccatgatttaaataaaaatcaacagctttcattctatccgcttttgaatatccgcttcttctgtaatgatttataactacagtgttatcgttttttatgtaatcgtcataccattttttcaatattctcctgtctgaataacctaatatatttataacaagtgctgctttaaatttaaataaaatataaagttctatagcttttttctttgtgattttttatacataaatagacctgtccggcccaaccttatgtcctcattcctaatttttacatatttatattgacatttatagtcaacttttaatccaaagatacatctattataaaaacaagccttactggtcatcattccaatgagcttatctttctttggcaaattccagatactctttttcagttaaaccactttgctccttcagtatgcttttctgtttcttcgtcaatttgtatccgttacagagcaggtggaaacttttatcaataatgtagttttccactgcccaagtaaaaactttaagatagttagatactttgaattttattcaaacaaaagttccaagacatatgataagatggctgttttggttgacaaaaaagcaaacggagaacacagttaaaaaaaagaacgaaaagcaattgcaaaaatcaatcaagataaaatacatttcagatttaatatgataaaatcattttatagggctgtgtaaatatgaggaaattatgatttacatataaacttatgatccttttgaatgaggtgtaaaaaataatagacaatacagaaacaaatgcatctataaaacaaaatacctcatcaaaagaaaaagtccccagataatcgaatatacaggtgaagaattgacgcattaatagaagatggtgtattgattgaaatgaaatgtgaatcctgtgggtatgaagaaggtgccccggactggatattagaagaatttttagaaatagaattaaacagcgggtcaaaaaatagaagatatagttgtcattgtcttaactgtaataagacaatgttcaggaaacagtgattttctgacacttttttaattgccttgaaatcaaagtatacccttatagtaagaattgcatacaattcttactaacgaatccaaaataaaaaaagcagaaacgcctctatttatcgacgtttctgcaaattggatattcgatatatctaaacagctaaaagttggcgatattcatcaaatatctggttttcttatattattttataaatgaattgctagtatttcctggggctttctcacctttatttaccaacatgacttctattgcttctaatctctttgacaatccttctgttccagcgcttgaaccatttttagcccaacctaaccaaccataatcctgcgcatggacacgataatagatatcatatttatcagccatttcaccagttagtttgattttgattgcttctaatctttttgattgatcgactgttcctgataaagcaccattacttttccagtcttgccagccgatatcctggatatgagcctgatattgaatatctccatcatataactggttatcaagattaatttgaattgcttctagtctttttgattgatttgttgttcctgatgtttgaccatcatacgcagtactctgccatccataatcttgaacgtgggtactgtatttgatatatctttgtcgataaggtgtagctgtaccaccaggtgctgctgcacctttttttactagtttaatttcaattgcttctaaacgataagaatatcccgcagttcctgctgattcaccattctttgcccaacctaaccaaccaaagttttgggcatggacacgataatagatatcatatttatcggccatttcgcctgttagtttgatcttgattgcttctaatctttttgattgatcgactgttccggataaagcaccgttacttttccagtcttgccaaccgatatcttggatatgcgtttgatactgaatttctccagtatatgaactattttttgataaacttatcttgattgcttctaatctttttgattgattgactgttccggctgtttgaccatcttttttagatgtttgccaaccgatatcttggacatgggtttgataattcactgatggggtttgttctacaacagtaactgtacatgttgctgttttaccattgcttgtttttacagtgatagttgctgtaccattagatactgctgttatcttaccattagcatcaactttggccacgctagtattactagaagaccatcctaaagttttatcatctgttgtatttgtaggattaattgttgcttgtaatgtttccgtacttcctttattaagggtagtactagacttgtttaaagtgacacttgtaattgaaagattttgaacaagtctaaattcaatagcttccatttgttcattaccactagtgacaccactcatactcccttggtttgcccaattagaccaacctacattagataagtgtgtacgatattgtaatttatacccttctaatccatttaattcaacattcacagcttgtaaaggtaacgattctcctatactacctataattgtatctccagaaacattagtatatgttttccacccatttttcttatcatatgttttaactgttaaattataattacttacattatcaaggcctaattgaaaagcctgcaatgccaaagactccccaactgtacctgctgtctcactatcaccaacatattccaaccaccctgaattactaacatgtgcttgataataaatgcttggcttagtaatcactactgaactatcttttactagtctaaaatcaatcgcttgaatattttttccagaagttcctgcattcgacccttgattcatccaactagaccatcctatatcagaactatgaacccgatattgtaacttatatccagcctgattagttaaggtaaaattaacaatttgcaacgctttattattattgccaatcatagtattcgatgtgattttatcatatgttgtccatgatccatcgctatatatcttacctgataattttgcagattttactgtattagacaaattaatttttatttgatataaatctaatgacctacctgtagttcctgctgtattgggctctgttacctgatctagccatccaacactttgacaattagcctgataagaaattgtcggttcattactatctttaccagttggctcacctactgtattttcagtatccttactaacagatgaaattgaatttgatccttgacttacaactacaacacttgaactgggaataaaaccataatctttatcaaaatcatattctgcctgactaggtgtattaataatacctgtgcgattactattaaccgcgccatcagattgaatcttgtaataaccatttttatcaccattttttaaaataataaacgcataatttgatggtgcttgtccttttaatgatgttgtcttactttttggatatgtagaatataatgtgttagagttggaatttgcatcactttttatattgataatattatgattcgtattaatcgtatctttaataccaatagtatatttataagaatcttttgctcctaaataactatcaattttccaacaaacagcagctgccttctctccccaataaggatctgatgcatattttacattaataccacttgctttgtctccaacattagctccaaaatatctaccgtcagtcacaggatccaaatatccttttgaaataaactgtgatgaatgataataaatactatattcaactgatgaataaccatttgcacttccactcggatcactatcataagcagcgtgaccaaataaattattcttatttgctgctattgaactgcatccccaagcactttcattcacagctaccgccaacataagaagcgcatttgttccatatttattttgattttcaataaaagcgctacctgtatttcttaattttgaagtacgtccataattactttctgatgatccaaccatcgaattaattgcactattcaattgttctgctgtatacgtagtaacactccgatgtgataagtactcataataattatagtatggtgagttactatttactgaattagcccttgaattattacgatagtcgtttaacattgtagcatagctagattgtgtacttccttcataaaagtaatgaccatcatagctataatactctacaccttctttcagataggacggtttaggcccataatcaagtgaagaaccatatgtactgtttaccaaattagtactaattccatgatatattctgccatttttcacataatatttactcaacgtatttactgcggaactagtatattccaatacctgtacctcttttacattaacccatcctactacaccagcctgcataaattttactttagttggattagtttcattgtcatatcctaaaaaagctccatctgcagcataatatccattcgtatatcctgccctagcagttgtaacttcagtgtattcagtattaatctcagacgaacttttagttctaaagttgacaacggcagtagacgaattactaattctagctgctgaacgcattacaacatttgattcaaaagtttcaaatgttttaggcatctctgcttcagtttcttccaatggaaatacttctccatcttcattcatagtggttacatcttgcccattattaagaatatcttccgccttagttgtatccttatagttttctaatttttcttctgtatcctttatttcttcagcagaaacattatttacaaaatgataattagaaaaacacactgacataaccatcaatgagactacaattttttttactattcgcttcatttatcgacctcctcttctaaaactttatccctaaaaattataacaatgattattttaaattactagctaaattatatgaattacacaatatgtgaaaaacaattacaattatatactgtgattctaaatatttattattttatttctttataaaaaggttccttatacttccatgcatgctgccctgccatattttgacattttatataaattttacattaaaattactagtgctttttataaaaaatctttaaatagagcaagcactaaaaaaatagtgaaacatagtatggctaaatctcactattttatgcttatatcttattaatatatgcgatattagtatttatctttaataccattagtaattactaatattaccgctataatcaataataatcttagcatccgattttaaattttttaaaatataaaccatattatcctcaggaatagaaatacatcctgcagttgcattagaagtattgcaatgtaagaatattgctgatcccatcccaggaatacacgctttattaaagtcaagggctaaagcatacttatatgctttagcatatccaattaaatgttcggctgaactccattgaattccagtttcccttatatccactagtttattgtaatatttactattaacatcatcaacccagtagtgattatcattaacttttaaataatcctttgatgaacctgggtcatctgccaaaccaaaagcctgaccaaatgaataaattcctgttggtgttttaccatcaccttcgctaattttatttatgccatttttcccaattctaccagatacattaaacttatcctgccatatcccttcgttatctttagtgtgcatcgaaacatcagcatagcttccatttgaagctgaaacaataataagttgtgaagaagtccgagcagcttttaaatttgctacccatgaattatatttataaaatatattttctgttggtcctggtgccccttctcctttttttaccagttttatttctattgcctctagtctatatgaatacccctcggttcctgaagctgctccatttttagcccagtctaaccaaccaaagttttgggcatgaacacgataatatatatcgtatttctctgccatttcaccagtaagattaatcttaatcgcttccaatctcttagattgtccacttgttcctgctattgctccgttactcttccaatcttgccatccgatatcctgaatatgtgtactatattcaatattcccattgtatatttgattatctaaattaatttgtattgcttctaatcttttggattggccacttgttcctgcagtttctccatcatacatactatcttgccagccaatgtcttgcacgtgggtattatactttatatacctctgtatgtatggtttaactgtatttcctggagctgctccatctttagttatcaatttaatttctatcgcttccagccgatatgaatatccagcagttcctgcactattgccatttttcgcccaatctaaccaaccaaaattttgtgtatgcactcgataatatatatcataatattctgctatattccctgtaagttttatccttatagcttctaatcttttggattgattggttgttccagataagtctccattactcttccaatcttgccatccgatatcttgaatatgtgtttgatattgtatatctccactatgcaaatcattatccattaaatttattttaataccctctaatcttttagattgaccacttgttcctgcagtttgaccatctgttttactactttgccaaccaatatcctgaatgtgtgtttcatacgatattttaggttctaaaaatttatcattaccataattatcactattttctgttaaattcacttcaccgaaatcatcttttgcatatatcgatgaaattggacaaaataaaataaaacacagaaaaattcttaatatttttttcataaacaccttccccttcaaatatttttttaatcttctttattgatatattaactttaaatcgagtcccaaaagtgatatccatcttctaaactaaacaaatcagtaaaaggatatttattattttgaaaatttaatgtgaccataatttctatatctatattctaatctataattaattaactgtctaatataacaataatatatatttttattacttatcatctctatagtggcaaataaattaaatatatttgttagatcatattaatagattattgatcaaacttataaatattctcatctaaaaaagttgaactctttttaacttcagcctcaatataagcctgaccatacttttcaatcgctgtaggtaaactactaaaaagatttgtacctaaagctaacttatttccatctactttaaatcccatagctgctaacgtagttggaaacatatctaaatgactgaactgtctgttttttatattattactcgatactttagaattaataaaacagttatatgtcgttctaacataatcagcaggaatatctttagtatatttaaccgccatagtattatgatcaccaactaaaacaattgttgtatttgcaaaccaggactgttccttacaccatgagataaaattatttacttgttttgattgacaagcataaatattctcatatctatttgaataggtattcggacaaagtgaacatttaattccatcggttgtatggcaatctattgttgccattgtaaaattaaatttttgaccactattgactaagttagttatctcctccttagcaattctaaataagccctgatcatttattccccactcgcacacttcacctcgttgcactcgtccatcattcttaagggctttataatctacgatcttatagtttccatgttgttcgaacagcttatcagtccccgcgaaagttgcattacctccaatacaaaattcctgaatataaccattttccgcaagaatatcaccaatcatttttgctcccggcataaatttagcataattactcatatcattagctacttctgattttaatggcaagcctgatgactgccctaccattgaagctatcgtccaagtagttccagtaaaccccaaagcccctccagctttgtcagtatttgaaaaactaatattctcattggctaattgagtcagctcaggtaaacaattaatttctttgataccgccattaacaacatccatgaacgtattttcataagactctaaatatatatatattaaattattaggattctcaccagaaactgcaacactcgttggatcagcataaataagttctggatctccgtccgaaacctctttctttacagcaatctttttcggctcatatatttccgttttttgattacttttgcgcaaatagtcaaataccccaaaattactttctgccatagataacgcacctgccaataaaacaactcctaaaacccatagatgacgattaatcacatataaaaatcttggtttcacaaatctatttgcccaatattttcttatcaaatagtaagaaattaaaacaattaccattattaccaaagaaaaaacaagtgattctaaaatccagctaataataataccatgatcagtacttgttgtcggagctaatacagtaaacaacaactgatccatatctacttttccaaaagtacgattacaccacaataccgaagtacaaatcattaacgataaaaataaaaaaatactaaatataattattgatacagctctatgccttttactcattactatcaccaaatttaattttaacataatctttaacaatttctaacaaatttctaacacaataatatattcgtttctaaattagattaaaaatttatttttctttaaaaaaacaacacttcaccttataatataactatggaaaaactatattcaactggtgaatttgcgaaaatggcaggtgtcaccttaagaacaatcagatattatgataaaatcggtcttttaaaaccaacaaaaattcttgataacggatatcgccgctattgcaatcgtgatttaattacccttcaaaagatcctctcactaaaagaattaggattctcacttgaagaaatttatcctcttattcaagataataaccaggataactttaaagagtcgattaaactgcaaaccaatctaattgatcagaaaatcaaacatttaaccaatctaaaagattctttaaaagcaacagagcgtctaatcaataaaaaaaatatcgcctgggacaaaattattgaactgatccgcttatcaacaattgatgataatcttgtcacgcaatatatgaatgctaaaaatcttgatacacgaatcaaactgcatgacaaattttcaataaaccagcaaggctggtttccctggatttttgaacaaattgatttttccgccgtgtatcgtctattagagctcggctgtggaaatggtaaattatgggagaacaatacatataatcttcgtaatcgagaaatcttcttatcagataattctgagggaatgatagatgaaattcgtcaaaaacttggaaatgattataattatattgttgcagactgccaaagtattccttttaaaaataactactttgatacaattgttgctaatcacatgcttttttatttaaaggatttaaaacaaggtttaactgaaataactcgtgtcttaaagaataatggtactttttattgcacgacctacagtaaatatcatatgcaggaaattagcgaacttgctcaaaactttgactcacgtatctctttatctgatgatcctcttcctgaacgtttcggtcttgaaaatggtaaagatattttaaaaagctattttaattatgtggaattaaaaaaatatgaagattatttgttaataactgaagcccaaccacttatcgattatattcttagttgtcatggtaatcaaaacgaataccttggtaatcgactaaaagaatttaaaatatatatcgaagatttaatcaaagaatcccaggggattaagatcaccaaggactctggtttatttatttgtacgaagtaaagcgactcttttaggagtcgctttactttttaaattggttcaggagcctctagataccgctccgcataacatgtacagatcattcccgtaatggctgctaatgaatatggatgactggcatagtcattaatactttcatagcgaatatagtaatctacatagggaatttcaatatccgaattacaagtaattaaatatattttaggtttgtcattagtatttctaaataatgtctttctttcaaaagctcgtttaaaataagtaccggattctgataaaataataatcaaattactactatcagcattattgatatattcaatttgatcactatatttcattgatgtatgaataaatttatggcatgtttgaagatcatattgtaaattttgggcaacactttgtgattgcatatatccaaaggctgcaacatttgaataattcgcaatatcagttaccaatttataaatatctttttcgttaattgttctctttaataattgtaaattttctataaccccttcaacaaaggattgaccaggaacctctttttgataactttgataatagaatttatttttggcatactggtgagctggctggtactttgcaatttgactttttaactcattataatctcgtaagccaatatcacggcaaaacctagaaatactagaattagacacatagcactctttcgctaattcggttatggagatatcctccagagcccgcatgttctctaaaatatatttagcaattcgataattattagaattaattaattcgctattgatcgttgataacaagataatcgttaaattatacataccagttccacccttcataaaatctattaataattcaatagtatatcatgaacagttaaaatgtctaattttattttctaattactactgttcttgctagtttatcatgaaaagattgtgataaaggattaaaatacgcataaataattgaagcgagggttattgcatacgctccatatttaagaatcggaataatctcggctgtaatcaataagccaattaatttacggatatacgtggctgaaacgacaatcccaccttctattactactgcaccaatgatttctcttaaaaacattgtttttgtatccactttttgtccatcagttttaacaacttgtagtttacaaattttctttcctaaagtttgacctttccatatatatgtcggaacagcaaaataataacaaatcccaacaactacaacaaacagaccatagatcattcctattttatagccatatgtttctagttgaaaagaatatggttgaatatagtccttacccctaagaaaaaaagttacaggaatagcgacaatcatattactaatgtaccagtcaatgaccattgctaaaaaacgctgaaatcgcaacttagcaatatcgtagccttttatctctacttttcttttattatctctttttttactcatttttcttctccaataaatttttaaaataaaaagagatttaaaatctctttttggtgtgtaagtttatctttatccttgattgtatcaacttttaataaattagctattttcttcagctaatttctgtttttccattaatttaaagaatggataataaagtagcatatccaaaataattaagataataaccatgattcccgctttgatatccatacagcccaaggctgcgccaatcggtgccggagttgtccatggagtctcaactacgccctttccaacaatatttaaagccatacaagtataagcaataattgtattaattaccggtacaaaaataaatggtatcatcattaacggattcaagaccattggtaacccgaagatgattggctcattgatattaaaaattgctggtccgattgataatttacctaatgtctttaactctactgattttgagcgtaacaagagaatacataaacctaatgttgcacctccgccaccaagtgtaattacataagaccaaaatggttgagtaaagaaattgacaattggctcaccagctgaaaaagcagtgatatttgccattaaatacatttgcataaacggcagtctgattggctgcgtaatacttgcaccatgtaaaccaaagaaccagaaagtttgagcaataattgtaattaaacaaattccaagtaatgaatctaatcctgaaattgctggtgctaaaatcgtcatgatcaaactaggtaataattcaccactaatattttgaataatcaatgataagccatagaagactcccatacaaacaaatagtggtaaaattgaatcaaatgatgaagcgattgctggaggaactccctcaggcatcttaaaacgaatatttttcttcaacatcaccctcattatttcaacacagccgatagaaacaataatagcagtaaaaatacctttagcatctaggtaggtcgtaggaataaaactagctgcctgtgctaatagatcattagtgttggccccctcactaattgcactagtcaataccgcagttgttgttggtgcacaaatcaataaaaatactgtggttgaaacaatcgctgcatttaatcctgacatttcatatcttttagccaaatgatatgcgatcgcgatagcaacaaatagccccattaatgccattgtcatattgtacggcagtcgcaaagccgttgcattggcctgagcccaattataccagccaattaatagatcactaattactccccaatccggtaaactctttggcgtaaatggtggagttgaaataattaaacaaaaaccacctaaaatcgataatggaatcgccactaccataccatcacgaattgctgccaaatgacgctggttcccaagtttattagcaattggaactaaagtcttattggcaatctcattgaatttttcaataaaattcatattttaattcctcccttcttttaacctccccatgattatataaactcaaccagtctataaacaattattttgcataattgcgaaataatttccaatatttggaaatcactaattattttagttgaatttatgataaaatgaaaaaatagctaaaaaaagttattttaaaaaatataaatattattaattattttaccaaaattaccttgacctaatatctttattgccttagaatagcctttgtgtaagctttacttctttatccaagatgtttcataaaatatgaaaatcaaggagaaagattatgaaattaattattgaagattcaaaagaaaaaatgagtgaaagtgcgatgcaaattttactcggaacaatgatgcaagataagcgtgtaaatatttcactaaccgctggtcgttcacccgaattattatataaaatgatgattccatatgttaaagatcaagcaaaattcgctgatgtgcaatattatttattcgatgaagccccatatattggaaaaacagctaaagaagatggtgaaaactggaaagaaatgcaaaaagtgttttttgaaccagctaatattcctgccgatcgagttcatatcactactatggacaattgggaaacctttgatgaacagattcgtaatgccggagaaatcgatgcaatgctgattgggttaggatttgatggtcacttttgtagtaactgtcctcgctgtacaccaatggacagctatacttatgcattagaacgcaaaattaaaaatgcggttaatcccgcttatgctgataaaccccaacaaccggtaactttaacaatgggtccaaagagtttgatgcgagtaaaacacctagtaatgattgtcacaggtaaagaaaaagcagaaattttaaagcaaatgcttgattcaccaatcactgacgaattaccagctaccattttaaaactgcatcctaactttacggttatttgtgatcaagatgctgcttcattactagatttaaataactataaaagattataacaaaacggcctattgtagtgtcccgcctaaagttagactgactttaggcgagcgctgcatattagccgttttatttattttcatatttttttgcacttgagaagccttttcccctaacctcatttaccttattgataatcataaaggcatcaggatcgatgtcataaacataattatttaactgggtcaactctcgattatttacaactgttaaaactactgggtactgattatgcttaaaacccgtctcactatgaatcagtgtagttccccgatcaagaacactaataatcttttcatttatctcattaaatttagcgctaactattttgacttgcatctgtgattttccaataaccaatactttatctaagacaacagtatagatcagcactagcaagattccataaaaaaccatttctcgattacgaatgaccatttgtcctagtaaaataataaaatcaaaaccatacatacttactgaaataggaatacctaattttttatttaggatcaatggcggtatatccattcctccagtactagctccacaacgaattactaaaccgattgctgtaccaatcattaatcccgctaaaataacgcataataatgtatctttactcatcatttcatttttaaaaacaccttgaagaatccctaaaatgaatggatagtaaaaagaactgatcaaagtcgttaaagcaaactttttccctaatactttccacccaattaaaaacatactgacattaaaaattgaaacaaagacagttattgaaaatccagtcgtcgcatttactaacaacgccatccctgttgttccacctgtaattaaattattaggtaaaataaacatcgttactcctaaagcataaattgtattacctaataatattccgattatatttctgatatctttcattttctcactctttcatcattactttcaactttatctattttaaatcataattgttttttatacaatacaattactaattaattcttttagacatctttttagtactaaaaactttaatatcattatacaataacagttgacccttacgttacgtaatggtttaagattatgatgaaataaaggaggctttttaatatgaaaggtattgtattagctggaggatctggaacaagattatatcctctaactcaagtaacaagtaaacaattattaccaatttatgacaaaccaatgatttattatccattaagtattttgatggaagctggaatcaaagatatcctaatcatctcgacacctgatgatactcctcgttttgaagaactattaggtgacggcagccaatttgggatttcacttcaatacaaagtacaaccctctcctgatggattagctcaggcatttattcttggtgaagaatttattgatggtgaaggatgtgcaatggtcttaggggataatattttccatggtcatggcttaggtaaacgtttaagagaagctgctaataagtttagtggagcaaccgtatttggatattatgttgatgatcctgagagatttggggttgttgaatttgatgaaaatggtaaagctgtttcactagaagaaaaaccagctaatcctaaatctaattatgctgttacagggctatatttctatgataaaaatgttgttgaattcgctaaaagtattaaaccaagtgcccgtggcgaattagaaattactgatttaaataaaatctatctagataatggtactttagatgtaactttattaggacaaggatttacctggttagatacaggaactcatgaaagtttagtcgatgcaactaactttgttaaaactgtagaaactcatcaaaaccggaagattgcatgtcttgaagaaatcgcttataataacgggtggatttccaaagaccagcttaatacatcatatgagttgtataagaaaaaccaatatggtaaatatttaaaagatgtattagacggtaaatttatagatcaataagaggtagacaaatgaaaaaaattgaaactaaaatccctggtgtggttatcattgagccagatattcatggtgatcaccgcggttatttcatggaaacatattcaacaagtaattttcatgaattaggaattgataatgtctttgttcaagacaacatgtcttttacagcaaaaaaagggactttaagaggcttgcatttccaaaatgatccaatggcccaagctaaattagttagctgtactaaaggaactgttattgatgtcgctgttgatattcgtaaaggttctccaacttataaacaatgggttgcagtagagttgagtgaagaaaataagaagatgttctttattcctcgaggatttgctcatggtttcttaacattaactgataatgttgaatttagatacaaagtagataatttatactctaaagaacatgatcggggaattcgttacgatgatccttcggtcaatgttgattggggcggattattaaatggaattgaaccaatcttatcagataaagataaaaatggtcctacattagatgaaagtgattgtaattttaaattcgaaggagataaataaatgaaaattttagtaacaggtggagcaggtttcatcggtggaaactttgttcactatatggttgaaacttatccagaagatatgatcgttaacttagatttattaacttatgctggaaacttagagacttgtaaaccagttgaaggtaaaccgaattataaatttgttaaaggtgatattgctgaccgtgaattcatctttaagttatttgaagaagaaaaatttgatgttgttgttaacttcgcagcagaatcacatgttgatagaagtattactgatcctgaaatcttcgttaaaacaaatgttatgggaacaactactttattagatgcagctaaagaatttggagtaaaaagatatcatcaagtatctactgatgaagtatatggtgacctacctttagatcgacctgatttgttctttactgaaacaacaccattacacacatctagtccttatagttcatcaaaagcttctgcagatttatttgttttagcttatcatcgtacttttggattaccagtaactatttctagatgttcaaataactatggtccatatcatttccctgaaaagttaattccattaatgatttcaagagctttagctgatgaagaattaccagtatatggtaaaggtgataatgttcgtgactggttacatgtatacgatcactgtgttgcaattgacttaattattagaaaaggtcgtgttggtgaagtttataatgttggtggtcataatgaaagaactaatttagaagttgttcaaactattttaaaagctttaaataaacctgaatctttaatcaaatatgttgaagatcgtaaggggcatgatcgtcgttatgctattgatccaactaaattagaaacagaacttggatggaaaccaaaatataactttgatactggtatccaacaaaccattcaatggtatttagataataaagaatggtggcaaaatattctttctggtgaatatcaaaactattttgagaaaatgtacgctggaaaagtaaaataattgttatttaaattaaaaattgttgaacataaatgagttcaacaattttttttattatcaaattaattaaaatttgaagatttttggttcttctgtaaaagaacagatttttgcagttacattacgaagataaaatacttctgtatttccatctccaggctgatacattttttgcaatgatggataggctgctaacatatgtttttgtgcatcaatattattatcaagataagcagttgcttcaattctaatccattttccatcatccatagcacaaatctctatttgaggattctctttaatttgtcgcgaaacagctttaactttaccagtttggatatacaatctattattatacaaatcaattgtcccaaatggcctaacccgcggtttataaccctcaacagtagctaaataataagttccacatttcttcaagaattcataaacttcattcataccagctcctccttataatatatattttactcccctcaactcattagtacaatctaatcattataaacttagttaaatcattatattagttataattttattctttaatctctcttatcagcatttataataaataatttaaaataattaaaattaaaaaagcattcctttagtttaactaagaaaatgctttttaataattttaataatgaataaaaactggatcattcattctaatcagctcatataattttttggcatcctcttcttgaagattcaaacatccatgtgatccttttactttatacagatctggagtccaatttgcccagtcgcttcgatccaaagcatgatatccagttcctgtccacataattctaatccaatatttaaccggagtctcgtaatcttcgccaactaaaactttctctggttttttctctttgatataccatacccctgtacgtgtgatacgatcgtttttctcagttggtaatccacttacacaaatacaagaataagctaattgaccatcacgatacacgtatactctttgttcagttaaatcaatttcactataattttgagtatcccaatcattttcaaagttttcataatctttttgatatgccttattagaataagttggttctaattccgttgttaaagctttttgattctttttactttgctcactgaggtaggcctcaattaatttactgtccgttttttcagtaatcgctgcttctacttgtttaacgatcttttcataatcaaggcgccagccatagtcaccacctgaaatctgaatcacgtttccattatgagtcgtaaaattacgtttctttccaactgtcttatagcgcaaacaaaattcttcaatccactcgctcattgcttctttatcaaggacaacttcacctttatcattacagcttaaccagtttttaatatcatctggtgtcatcgtctcaactttgccttctcccatatcccagttaatccaatttaatagataattattatacgtattcaacatctcttctaaatgcttatcactaatatcactaactggctgttgataaacttctgcatatttatcttgatcagttaaatcaatctttgtagttaatttacttattgacgttgtaattaagttactaaatttttcgagatttagttcatttccaattgttgctttaaccatttttccactcttcgttgtttcatcgtattcaatatgagcatttgttgactgcacaatttgatattcttcattcccattgataagcactgaaccattaactatttcacttaatttattttgatcataagatatttttaaatcaatatcatggttgtaaccactaaaaatcccaaaaatactacgttgactgcgatgatttttatagtcactttctagatttttttcaaaatctgcacttaaattaatatctttccctgcaatcgtaagcttttgatttccctctgcccctatttccaaagcataactttcaatctggttctttaatacatttttactttcttcataagtcatgcttgatacatcgattccattaatagatgtattaggataccacttatcacgataataaaatgaaaaaatagcaaagacaacaataactcctataattactccaccagtaattttaacactcttttttaatttttttatcttcttaataaacgccaatctacttctctccttacaacaacaaaccttaaattttatctcattatagcacaaataatatcggtttcaatcaattcgcttaattaacaaaaaaatcaacaatcttaaataaatttaacaaatttaacataaaaagccgactataatcgtcggctaacttaatccttttacatcagcttcagtaagttttttaccagcttcaattttatcaattactttacgaatattttgaattgattttttataagggattgtaatatatgttttcttccctttttgcgaatatgtatcatatgaaatagccccatcaccagttacttgaacattgaacatttcccaattggccatatcatctaactgcatattaactaatgacttgatatcatcacttgacatatcagtttcaaaacttccctcaacagctgctaaaatattgctatagttagtaataattttcggtgacattgcttttttcaacattgcttttaataaccgctgctgatttttaccacgatcaaagtctcccgatggtagagcataacgttcccgaacaaaacataatgcttgatcaccatttaattcattgacacctttttttatcttataattaccatgtaatgttgtaaattcatacggtgagtctacttccactccccccaaggcatcaataatgtttgtaattccactaaaattagtttttgcataataattgacttttagatctaaaaagtcttctagtgtctgaatcgtctcattaattccatacattgctgaatgggtaattttatccatcttaccatttttatgcagattgacttgagtatctctaggaacactaaccatcaatacttgtttttccaatggattgacacaaacaacaagatttacatccgcacgagagatagtgttaactgaaccatatgtatcaataccagttatatagacaataaaaggattttcagtaacatctgtctttgttgttactgcttctaatttttcttgaacttccattttataaaccactttagtttcatcttcaaaactttcgtgattagtttccaacacacctaaatatgactgatcagcaacaatacaatctacttcacctttatacagagcatctgctaaatcagcataatcactataatttttcttttcaggttctttaccgattttttcttgtacttgtgctaaagcatcggtaatactagatacactagttttattttctactccgattgtttttcctttcaaatcttcaactttattaatttttccttgcttcattgcatatactgcaataactctagtttgtgtaaatgcacttgtaatattacttaaaaaactattaccctgtgaagcatacacgcttcctacgatcaatagagcagataaagcaacacttacgaacttactaataaaaattctaaagccttttcctgttcttctttttcttcgtgctccggatgtaatccaaatcatttcaagcaataataatgctattaaaacaattattaaaattgcataatacctagttggtaacattttcaatacataaatatatcctaagaatacggctgaagcaattaactgtatcgttaaaataattcctttagatgtaagtttagaaaacattccttttttctttttcttctttgccattctctcacctcaccgaacaccttttataatatcatattgatttgtcgtagcataggttattttgttgttaaatagaaagagcttcataatgaagctctttagtttcctagcccttttaaatcctcttcagaaatagttccaccttgttctaccgtatcaatgatcttcttaatttttttaacttgtttttgataaggtttcattacatagacctctgttccatacattgatgcagttttcgaagttttataaccttcaccttctacttgaacattataaacagtccaatccgacatatcgtttaactgcatattcaataacgacttaatttctttacttgacatatcagtttcaaaacttccttcaatcgcagtcaaaatattattaaaattagtgattatctttggtgacattgctttttctaacattgcttttaataatttttgttgatttttaccacggtcaaaatctccatttggtaaagaatatctttcccgaacaaagcataatgctttatccccatccatttggttttcgcctttaacaatgttgtaattaccatgtaatgttgtgaatttataatcagaatcgattgttaccccaccaagagcatctacaatatttgtcattccactaaaattagttctcgcaaaataattaatttcaacatctaagaaatcttcaatcgtactaattgtttcacttgttccatagattccggtatgagttaatttatccattttaccattcttatgcaattgaatttcacaatcacgcggaatactggtcatcaaaatttgttttgttttaggattaacagtaacaatcaagtttacatcacttcgagctacggtactaacactaccatatgtatcaattccagtaacataaattgtaaatgggttttctgttacatttgtttgtttagttgtaacacttaacttagattcatattcatatgatttaataatttttgtttcgtcatcaaaactatcatgatttgcttccaacatcgacttatattcttgtccaacaataatagcatctacttcacctttatacagagcatcggccaatccgctatagtcatcatatttaaccatatcttcttgttccccaagatcattttccatatcagcaattgctttagtaatcgtcgttgtatcatgttgataagatacaccaaatttctttccatcaagatcacttaatttagttgcactattatttttcattgtaatcactgaaactaaatatttttgtgttgttgctttagtaacggtattaaaaaaatcatttcccctaacaacataacttgatgcgaacattaataaaatactcattaataagctaataatttttgtaacgattgaacgcttgctttttaaaccttgattaattttcttttgcccgctcctcatgataaagaagaaaattataattaataaacctaatgcccctgtcgctggaatcaagtattttaatggtactagatccaattgaaagattaaatatgtaaacaatgcggttgcgaataactgcactgccaaaatcaaatacttagaagtaataaatttaataaacttattgtctttcatataagcctcctatattcgcacttttttaccgttaaataatatcataatctgttttataatacaaatttatgtcgaaataaatagaaattttaagaattttgtaagaaatattaatcattcatctatgtttattaataaacatgttatattatggtctttatgtgataattttagccacttttatcataatccttctttctcatgaataatccatgttatactaaaaataggaggaatccaaaaatgaaaaagatattactgacgatattatcactatttttattaaccgggtgttttagttttcgtgaaaagtctaattctcgaccagcaataactattgatactgactacttaagcggcgatgcgagttatttatactattatcagtctttatcatctaaagaaaaagaaatttatgaaaatatttataattgcattcttgataatgcaaaaaaggtcacaatcagcagtaatgattatgaattagttcaaaaaataaatgattatgttttatatgatcatcccgaaatctattatctagattattttgagctacaaaatcaagttgatatatgtaattatattcccagttattcatattctaaaagtgaacgtgacactttaacagctcaattagaatctgtccgtgatgaattagtaaattcgatttcaagtgaaagtagtgattatgataaattaaaaaaaatttatcaatttgtaattgagaagtgtcgatatgttgataatgctaaagataatcaatatattactagctcgttaatttatggtgaaacagtttgcagcggctatgtaaaggctattcagtatcttgctgaagcagttgggataaaaagcgcctatatcgtgggtaaagaaattggtgctagtgacgatgaagcttatcatgcctggaatttaatttatctagatgatgactattactatcttgatgctacttggggtgattatgatagcgaaggcaatatttttgcaatgatgaactattttatgtttgattctgatgatatgttgaaattatatgaacctcttgatcaatatgaaataacgaaacaaggaaattatacgtatttcaaatatgagaatctttataacgaaaattacaataaagcagcattaaataaaatggtaaaacagtataaacatgataatattgcctggatggaatttaaatttagtgacagttgttatcaggaagcaaaaaaaagattgattgatcaagaggaaatgtttgaccttttcaatccctatacaagtaagcaatatactgttcaatatttttattatgataatttaaatgttttaatttttaatcaaaaaatcgaataatcagccgttcgacacgactcgttattatccttgaaaattcgagaattcttcacgaattttcacgaaaactttcttgttatagggaacttaattccttactttactaaatccctaattatctataaataaacccttttctcttttatactgtataaatataataaattttgtcactaaaacgaaaggggaatatagagatgacagacgttaaaaagtatacagtatacattttagaagaaaacaaggatttattgaataatattaaggacagtttaattgcgacaaataactttaccgttattggtactagcgataatgcaacaagctgtttaaactatttatctaataataattgtgatttattaattattgatttaatgcttaccaacattgatggaatcggtgttctaaataaacttaaggaagtaaatagtcgtgcctataataaagtagtttgtattactagctttactaatccattaatttgtgaaacattagaaaaattaaatgtaagttattgttttaaacaaccattcgatatcaattattttgcgacaaccttaaattctgtaatgaaagttacattagaagatattaaaggtatgtcacaaaacgaatctgaaaaatatcaaaaaattaagttagaaaatgaaattacagatatccttcatgaagttgggattccagcccacatcaaaggatatatgtacctaagaactgcaattctatctacttactataatatcgaattattaggtcaagtaactaaagtcctttatccagatattgcccgccaatacagtactaccgcttcaagagtagaacgtgccattcgtcatgctattgaagttgcttggaaccgcggtaatactgatgcaattgatgatatctttggttatacagtcagtgcaactaaatcaaaacctaccaattctgaatttattgcaatgattgctgataaacttcgtctagaacatcaaacaaaagcggcaagccgtcatagttacttataagagcgtaagctctttttttctacctaattttagaaaaactaatctttttcttatatcaatcatggagatctccataactgacataaaaagaggaattaaatcctcggatcgttaacttcctttatactttgataataactcatctacaattgttgaaataaattcagaattacatgttttacgttttgcccgaaatccaaatagctgctctagctcatcttgacaaccactttcccaagtacattttaaaacatgacgaatcgactgttcaactcgtgatgccgttgttccataagttctagcaatacgcggatataattctttagtaatttctcctaaaagattaatatttccacaaactaaaacaattgctgtaactagataattatagccttttaaatgtcgtggcattcccactttcataaacgtatcatgaatttccttttttagaactgtttgatgataatcgtcaatacctaaattatgttttaatctaatttttaagatacgatcaatgatttccataaaatagtttaaatcaaccggtttctttaaacagtaatctactgctaagccttctaacatttcaaatactagtgagttagtaaaatcactaatacaaataacatgttttaaggcttttggattgttagatcttatattcccaatcactccagcaccatctatattagtcaaaattaaatcaattacaagtaaatcacatgtatgcgtagctaaatagtcttcacatataccaccatcattaaaagttgcaataatttcataatgatcattacttctaatcttattgaccagttcctctttcaacaaatgattttctgttaaaatcacaatacctgccttattattcatttttaaataactctgtgcctaatacacttctcctcacttttttcctttatcccatgtctaaaaacctatttttaagcgcactaaaacatcatatccgagcctgtttcataatttgccaagaacttgtgatttaatattaatttcatgttcaaagaactcatttatacactcccccctaacttatcccgagtgctagtataacaaatttttccaatttcgaacataaaacttatgtgtatatagcaaattagctaaaccaaatggttcagtaggcgtgacgaggatgaatttgagaaacatttcatctgtaaaaattgtacttgatatttttcaaagaaatatctctgaatctctctttctttactttttagggtaaatccagatttttttagataatttacccacttccgttcataatttttaataacataaatagcatttggacgatcaatagttggataactacttaaaaattcttctaaccggtgattatagtaagatcttagcatctcaatttgtgtagtcagcaaaagcattgatgaaggtaccatgcactcaacaaaaactgcatgtgtttttccacagtgtttacacatcacacgctggattcgaatacaaattttattagttgcagttttataaaatcttggataacatccaatcttaacaaaactccctttggccccacaactacactccaggcttttaaaatcaacatgatctaacacttgatcatatatttcttgagtaaattcgttaataaaatactcggcactattagcaactgttatcattttctttatccccttaaattatccctttctttaaaatatcctattttcatcagaattgcaattatttagatagtcaaagttttttaattaagttaattttaaggagctaaatacacaaatataaaagacagtcagtttctttttcttttcttgacaatcttaataaacttaaaaagggataattttatcccttataattttaagcaaacaactgtagtatccatttgaaaaacgctggaaatacagaataatcaaaatcatttgaccatctagcaaagtccgctactgttgttgataaaacgcctaccgttaacgcttgtccaaatgacaataacagtccagcaacgactccagctaaaatagccccacgccagcctcctgtagagtttccaaaaacacctgctggtccacctccaaaaaaggtagtaataaccggtggtgtcagagcataccagccaattgcaccaaagataatcgtacacaatataactgtacctaaacaacttaaaaaacctagcataactgcagttggagcaaagttaaaaacgacaggacagtctaatgctggtactgcattaggtacaattttttcagaaatacctttaaacgcttctgtgatctctgaaaccatcattgaaacaccattcaatacaattgtaatccccactccaaattgaacgccagaaacaatcgcatataaaattgcgggctgtccattacttaaattcgcttcgacataatcaaaaccagccaagcatactgccacgatatataggattgtcataactaaagcggtagaaactgtaatgtcttttaaaaagtttaatttaggattaatattaatgttttcagacgattcatttttatgttttttaaataaatttccaactaatgaacccgtaataactccgaatgttgtggtgtgaccataggcaaaatcatcactgccggtaacctttctcaagaaaggctgggccaatgctggagctaaagtacagtagattcctgttaatagaccaccaataataatgactaacgtattatttggattagcaaacacttctacagctacagctaaataaacaaagatcaaataatatgtttgatgtgctgttaaaaacacgtacttaaatggtgtaaatctagctaaaattagatttataaaaaaaccaataaccataataattgcaatcgtcgatgcccactgttcagtaaatgcatttgttcccattccagttgcaactgtttcaatccccataattttttccagcagcgtagctatcggcgtaactacgcctgcgattgtgcttgttcctacacttagaattaaataaccgattcccgttttgactgatccagaaataattttatctattgattttttttgtaaaataagaccaatcatcgcaacaatacttaagaaaataaacggctgattaaacacataattttgaaaaatatctacaataactttaaatactgacataatctccctcctctacaataaattctttttttctaataatttttttattttttcctctaattcattcatatccattagattattgattacaataacatcctcataacaagaacgtaattcatcagcaaacgattcaaaagtaaatactgcatcgcacattagtcctttagacattgataatcctttattctcaactgttacctctaatggtaaagcaaattttttaaaagttttatcaatattcattcttaacaaagtgcttgttccgactccggcaccacataccgtgataactttaaaacttttcatttttcatccctcttttgcatcatgtaatattgtttttactattttagctggctcacttatggatgttccgataacaactgcaaaagctcctgcctctatacatttcttcatcttactaccgtcattaattcttccttcggcaatgactcttgatactccggctgtttttagctctttaataatttcataatctggatctggtgatggcactgttccaaatataattggatttttagaatatggcgtgtatcctgataaagtagtacctactgcatcaactcccgctttagatgctctgattccctcttccactgtagaaatatctgcaataacaaataactctggatatttattttttattttattaacaaattcttctaatgataaatcatcataacgttctctttgagtgccatctatggctataccatcaacgccagctgcaactagctgatcgacttcatccattgttggtgtaattctaaaactagaatgaagcggatcatctcctttatagatttttttaataccaataagaggaacatctacaacttctgcaattgcctttacatgttctaaatttgttcttatcgccttagctcctccagcaacacaactttgagccaggcattgaattgcaatagaattgtccatatagggatttattgctgaatcagcataacaagaaactatcagtccccctttaatagcatcaatatttttattatcctttaaaatatcttgataagaacgggcattaaatattttatgtaaatattttctatccattagacatagtgccacttcttgaaacagctttaaatgctcctcatcacttttagctgcaagcgctaacaatactcgaactggatcattaacagagtgtccaaacttcactccatttttaaaagttactaagctaatactattttgatacacatgaccatttggtcttgcgtgagccaaggcaacccctggcatgactacaatataggggccatttttttcaataatattcaccatatcatttatatactggtgatcaatatagccatttttctctaatagataaccagcatagacaattgcttctttccaatcatggcactctttataaaaatccacacaattctcttttatatatttaatcatatttacttacctcattaatctggtctaaaacatagtctagttcaaaataacgttctatcccattatttcttatattctctaaaaatttgataaaattatttaatgctttcatgtgcgtataattatctttagccgctaaacataaaataatatgcactggatcatatttatcatgattaaatttgacaccatttttaataattaacagactcattgatgtttgattaaccccataatcaatttctccatgaataagggctattccttcatcaataaccatatatgaccctgattttttcaccgtatctatcattgatttaatataacattctgcaatatcttgactcttaactagcatttgtccggcacagcagactgcagtctcccaatgatcgaccgtatcacatagtagaactttatcagctgttaaatattcatttaataatggctgcagtttgattcctgcatcaattcctaaatctttaaaatattcactgaaatcatcgaaaagctgctgatagtttacaatctcgcagtttctcttaacaatacttaaaattccatccataaaagtatcactttcttgaatattttgatgaacaattttttccatagcattttcaatcaatcgataatcactctcttttaaaattacattgactttaacaaccaaacactgcattatttgtagatcaatacttgaaataataaaatcgatattactgagatctatatttaaaatccgttcttcagttactgttttcttcacaataatatttttaaatctcgagcagatcatctccttcattaaagaagccgtcccaaaaccatgaacacaaacaattacaacattatacacatctttaaaacgattttttctctctaaagcggcacaaaaatgaagcgttaaaaaagctatatcatcctctttaattccttttaattccttatagcataattcatcaattgtttctaataatgctataaaaacttcatgataatttttcttaataactgtcaaactcggattaacaaccggtacttgattttgcagtttaaatactgtaggacctaaatggagggttaaagaattgatcaattcctcatctcgactaaaatttacattaagtttttctcctactttaaaggctaaagtagttgctatcatttgtatattagcccaatcatagataacatatcgctttaaagtcgtatatctagcactatttaataagatcgtaataatagcaacttctgattgtgacatcttaatatttaatgcctgcattatttgtgaacaaataaattgagcatcatgatatccttctgtttttgaaatctcaatcaaataatcttgatgtaggatgatatcataccctaattctattcttgtcaaagaaacagctaaatggatacaaatatctttatatgataaataggttaatttcttttcactatgactttcaaaatcattcataactttaataatgattttccagtatttatcgaagaccattcgataaatattcttttcaataaaagttattggtgtatattgaaagtgcataaatttattaaaatcaatattcttttcaataactctaaagaaacatgagcgtatgtctctttcgtcaccctctatataactgccttttcctgtttttacattaatagaaaaatcatatccctcatattcttgtcttatcgaaagaatatctttatcaatactacttttactaacattcatttcatcagcaaaatactgacttgtgagtggttcactgcaacaccacattgaaactaaaatatagcactttctttcaaacggacttatcgcatatacataattatccaaattcgaaatttctttcatcagtatctctttttcttgatgagtaatattaaactgaatctttccatttcttatcattatattttttttaatatttattgtttctaaaaaatcattaatatcatcaataacatatctaatcattcgaatagagatctcaaaatcatgtgctaaatcttctacttgatagttttttccgccgcacagcttcttcaatatttccacacttctagtattcataagatatcctcatatgattcaataagagaatcatacgcctcctctctactcacttcatataatgaatgcgatttttatattgatttaagatattttgattatattcgtcacctccatcaatattagcactatgaaaaatcggtggttcgaagccgtcattaactagattttctactacttgaataatcacactatttaaaataaaagctccggctattgtagaggttggggcaaccttttggtctagaccatcaatagtaatactggaatcctcaaaatctccacaattatcaataacaatatctgcaatatctaacaatttctttcctgtttcatgtcgcgaaactacagcttgactatattctatatttgtaacagcaatcacgatcacacccattgccttagcccgtaatgccatatcaattgcaattgtatttcgaccagaaactgaatgaataattagaacatcttctttttgtattggcgtatgctctaaaatcaatgtcccataaccaggtagtctctccatttgcgaggttagagttattggtcttacatctaattgaacttcctttgccataattggattaattaaagccaatccaccagcccgataaaacagttcttgggtaagaattcccgcatgagaagctccaaaagcataaatcgtatgtcccttttcaatacattgggtcatttctaaggcagctttttgaatagctgcttcttgtgaatctacaatattatttaaaatatcatgaatatgctgatagtatcttgatcttgctttcatcataaattccttatccgataaaaatatttatccactaatttatcattatgatcagcacaatcttcattcataaaagccatatgaccattgtaataaacatccgggtgaattccctttttaactaaaatatcaaccatttcacataatattgcattttgtaaaaagacatttggtattgtactagttgcccccactttcataggaaaattttctatctcaattgccgcatcacctattaatgaacaattatctaacactacatcagcaacatctttaagctttactcctgccttatgttttgtctttaagaattggctatattccactgcagtaatcgcaataataggaattcccttttcttttgcccttatagcggcatctactggtgcaatattattgccagaattagaaataataatcatgcagtcattaggggtgattcgatgataatcaactatcatttttccaatttcatacatattttcaatgtgataactttttgtaatttcaaaactgcctgttgcactttgttccagcaaagcacaataattagccggggtagcagctcgccaaaatgcatcatcgactactaaatgagaatgacccgtcccaaacccataaataagacctcctttttcagttgtatcagcaagtatttttgcagcttttttgatattatctttttgcgtattttttacttgtgcaacaactttttccataacttcaaaataattttcccaagcttccatttaaaagcctccttcctttacaatttcattatacctaaattcaaaagagcaaatatttgcaaattctttcaatttcttgagaagcattttacaagttcaataaaaaaagaaatttgaaataatatccaaatttcttaaaatacattatattttataatgaaaaaaggagttttaaattaataaactccgcgactctataaactttactttattcaaacaaggcacttcctacccttatcatcgttgctccatactttaacgcttcgtgataatcattagacatccccattgataattctgtcatttcaaactctgaatatttacaatttaattgatcaaataactcctttgtttgtttaaaatatactgctgtatcattagaatcaatatgtggtgccatcatcattagcccttttacaattaaatggggacattcttttaaataatcaaatacatcttcaatttcttctactgcaaaaccatgcttactttcctcttttgctacattgacttggattaatattggcatttttaaatcatgcttcttagcttgtttttctacttctttaattaatgaataactatcaattgaatgaatcaagctaactttatcaattatatatttaactttatttggttgtagcgttcctatcatatgaaattcttgtgccccatgatacttttcatatttttctaaaaaagcttggactcgattttcgccaaaatactttactcctagtttttctaattcattaatctcttcaattccaacatattttgttgctgcgaccaatttagcattaccaaccgattttaaaatattttttactgcctgttcatttactctcatttactgacctccatagactaattgcccacctacataagtagccaatactttaatgtctttaatatgctgaacatctacgtctaatatattatcactaagcacaacaaaatcgcaatactttcctacctccaaagttcctttgacctcttcttcaaatgaagcatatgcaccaccgatcgtaaacgactcgatcgcttcttctctagttaatgcctgctcttttagatatggtccagtcccatcgatagatgttcttgtaaccgctaattgaatcccttttaaaacatctggggcttcaactggacagtctgacccattagaaatagtcgttatattacgaagtgttttaaaattatatgatgtttgtgctaattggggagaaaccctttgattaataatatgattatcataatctaaaaatacactttgaatataagcatgtaaatgtaactgctgatatttaagcaactgatcttctcgagtgatctgacaatgcacaataccatgtcgtggatcttcacgagaatagttttttaacgcattttcgtatccttcaaaaatccaatctaagattccatcaccaattgcgtgaatagcaatctgcatctcatgacgattagcgtagtcaaacatcattttgatttcttcacgactaaaaacaggaattcctcgtgtcttaggtgcatcataataaggcttacttaaaaaagcagttcgtgctcctaatgatccatccccaagcatttttaatgggcctattttaaaaaactcatcaccactaccggtacaataacctaaattaataaactcttttaaggcttttaacgtcggtaactgtgcttgttcgtaaactcttatcgttagtttattttctgctcttaattgttcaaaagcctgtagagcatcatgataatcactagtggcactcaagagatcgtcactttgaacagatgttattccataactatgtaactctttttgagcgattaaaatattatcttttatttcttcaatagttggctgagggattgtatcatagatcaaataaagtgcattttcttgaaataatcctgcatctaaatcaaaatagccgccctcgactgcttcactggtaatatttgctaattcaattgctttgctattagcaactaagatatgtccacaagtccgcgtaattacaatcggttcctcttcactaatcatatcaagatcttttcgggtaggaaaacgctgttcatctgtaaaataatcatgattccagccccgcccaatcagccactgcccctttactaaatgtttctttaattcttctaaaagtgctttaagcgaattagtatgcttttctaatagaacattttttaaactttgaccataattaactaaatgcatatgcgaatcattaaaacctggatatacatatttattatttaaatcaatttgttcaccagaatattttaatgcttccttatcacttccgataaagataatttttcccttatcttctacaaaagcagttgcctgattacaaccgtataaatttccccggaaataaattctcataaaaaaaatccccctttatttagaaagtaggatactttgatcctacttttcattataatattttgttatatcgatactagtaactgcagcaacatcttgaccattgatccaccgaacacgttttaccgttgtctccaactgagcactaatgttacaattataaatcaatttagtatacgataaatcgctatccttcatatctttaattgggcagtcagcgcatggttcatcatagcctctaaaagacttatagcaataatcaccaacttttacctgattaaaaatatgtttgattttatgattataatacacaagtttataagtgttgggatcaataacgtaaatcccattttcttggaaatctaaaatcatttgaattgcatttaaatactgattcttttctttttcctgatattttttaacaagaaaagtactaattatagcaatcgaagttaataacatttctttttcttccgctttataagcgtagggtttttcatgttccatgcttatgataccaataatatcatcgccatttttaataagaccactaattaccatacgggtcttactattagcataaagtgttttaattgctggagaaacatctgaagccttgatatcattaacccaaagaatcccctcatcatcaaattgccgtacatacttaggccaataatcatgataagtaacatcaataacttttgttaaatcttcattctttgaactccaataattatttactttgtatttcccaatatccaaatctcgtacaataattaaattttggctcatataataatgcattcccaataattctaggactgctgtaattgtttcatttaaatcttgacatttatataaaattctaaaaatatactcaccaacattatcagaaaactttttggtagcccgatcaacaatattattcactttatccaattgaccatcactaatctctaaactctcatcatacaaacaaacaccatttttattattctttttaattttgtataaagcctgatcaccatggtgatataactcatcaaatgtttttccatgattagggtataaaactacccctacagataccgttactttaacttttgttcctccagttccataagcaccttcaatcagtttacatagatcattagccttatcaatagctagttcactgtttgaaatattcttcattaaaactaaatactcatcaccaccaagacgagcaactaagtcatcatttcgaaatttagattttatttttcgagatatttcacacaaaaatgcatcaccgtataaatgaccgaaattatcattaacctgcttaaaattatcaatgtctaagatcataatcgcatgattattttcaggaaaattttgaataatttcatttgttttaatttcaatagcttctcgattatatagccctgttagtggatctaattcaattttcttctttagtacaagatcatgtactttattttcattaatatccttgatataaccacaagcataaatatctttattaaattcaatcaaatatagtgtaatttgaataaaattataattatctttaaacttattatagaattgatattctaaatctaatttacgttttccatcacgataattatttaataaattttgccgatttaattcacgaagcactttgccatactcactaggaattgaattttcacttagttttaaaattgatttttcatagtttttaccatcataaaaatcaataaaattattttttgctattttccgatcaataacttcattcatcgttaaattaacttcaatataactcagtgcatctttacctaaagcctcacgatattctcgttcaatttcatacttgctctttagttcaacaaaatccgtaatatctttaccgattccaattgatttaactgcacgtccctgctcatcaaagattgttgaacattttagactgatccagcgttcttctccatctccacgcttcatctttaattcaattgaagtttcaggcctgcctttttcaatctcttggcataattttcttactcgtaaaccatcctcttgactgatgatctttgtttcaaccaaactttctgggatattataataagttttattaatatctaaaattcctaatgcaacttcatcaggacaaaatagctgctcaattgtatgatttaacacatcatattgccacaatgttgtatttgcttgttttaaagcaagcttataaatttcttcacctattagaagctcctttttcatatttgataattcggttatatcggtagctacgataataaaaccttgcggattgttttggttatcataaaatcttgaaactgttactttttctacacttccatctttatgaagattatctaatggttgtaaaccgtgaaggtaacgcataatacagcacttttccgtactacaattatccattttaagagctttacaaggctgcattaatacattttcacctatcagcttacgacctttccggttcacaaaaagtatcttcatttcattatcaattacgagaataacattatcaataacatctagaaggactttatattcattatttagtttatccattaactcttcgatatttttgaatttcaatcctgacacctcctagactactataattatattgtaacttaaccattaataattgtacaatcctaaaacttgcaaattttcttactgtccttataaatttattaaaaactgtatcttttttaatatccagtgtaatgttaagatacttatagatttaataaatagggggatttttatgaataataaaacacttaaaatagcgacaattggtttgatggctgcattagcctatgtctcttttacttttctacaaatcaaaataccaacgccagggggaactacatcatttcatttaggaaataccttttgtgtcttagctgcattattgctagggggacttcctggaggaattgcaggagcgattggaatgggaattggtgatctacttgatcctgtttatgttacctatgcacctaaaacaattatccttaaattaatgattggaatcgttactggattagttgcacataaaattttcaaaattgaaaaacatgataatgattctcatttaataatttatgttgtcatttcttgtatggctggaatgttttttaatgtggttggagagccaatctttggctatttttataattcgatgattttaggtgctccagaaaaggctgctgccaccttagcaagctggaacgctattacaacttcagttaatgctgttattactgtcgccttagcttctactatctatttagtcatccgacctcgattagctggcagtggtatcctggtaaaattagcacctcataaataagcttttattaaaaggtaatattataaaaagaacctccattatttggttgtccaaataacagtgtccatttcataatactacctttttttatttaaattgactttgtttcgggaatagcccaaagattccaccagtatgcataaataaaatattttcactatcaacaaacgttcctttttctaattcattgatcaaaccatagtatgccttaccagtatatacaggatctaatactactgcttctaatttagctaaagatgcaatagcatcaagttcttcacttcgacttaaagcatatccctgaccaacataaccatcaattatcttgatccgctctgtttttatttcctgatcaaaatatacttgcgcctctttaataatttttgttatctccttaataaagtattccttatcatcgcaaacattaaatccaataatttgttttttagtacgattaagctcatttccaatatataaacctgcataagtccccccactgccaacagcattaataattgtatcaaattctactttcatagcttcttcttgttttaagatttctgtaaaagcttcaacataacctaaagtaccaattccattacttgctcccattggaataatatatggtttatatcctttagcttcataggcagtttttaatttcagcatgatcttatccttatcacgattaaaaatttcaggttctttgataacaatatctgcaccaactaagcggtctaaaaaatagtttccttcgactggctcactacttccattgccacgaagtaataagcagcttttcattgataacttagctgcggcataggctgttgcacgagcatgatttgactgcatacccccacaagtaatgactaaatcacaaccttgttcaaatgcttctctcaatgaatattctaactttctaattttattacccgatgtttctattccagttaaatcatctctttttatataaatatttttttggaattgtttagataacttctctagtttatatattggtgttggtaaaaaagccagttctactttttctagtaactgcataatttatcccccttatccttattttttattatatcataattgaatagtttcacgtgaagcttttaaaaaaagtaccacgattatggtacttaattaggaatatgatatttttctaaataagcttcaaagacttctttatctttactgctgccagtacaaataaaagcaatacctttaggacttccaagataatcaacaatataatcaatatattctaattcttctttgccacttatattaacttgtagtagtaagcccgcatcatgtactttttgataaatttcattccagcaaggatcatttaatggttttgctccagcaccattgatccattgaattcctttaaaaccacattcaatgatcttatcaagatgacgtactgcaccaggaccatctaaatgatagaatgaacgctcaatcaaggatgcctctttctttaaggtttcaaaaacaaactcatcaaattgctctggaccaatcatacaacaaaaatcgcattgagaaataaaatatggtttttgtgataatagactgatccatccggtataacccaaagtattatttaaatcaatactagcaatcatctcttcataggcttgttcaaatgctttgtaaatgtcatcatttaaacgttgaacttcatcaggatcatcatataaatcaattagtgagttatttgcccctctcattgattcaacgatatccatcattcctccaagattagcaattcccattgcaatatcatctccataaaactgattaaatgctttgattagttctaatgatctttgatataagggatatgtttcctctaggcgaggatgaatatcttctaactcacatcctttcatttcttgaaaccaaattgtcccttgttttacatcaatatgataagtttgacctaaataggctcctaaaactccggttgagcgcatataaaagataggaaaagcatcacccaaataaatattcgaaaaaaatgtttcttgatatgcttgaactacctcattaaccggcttatctaaatcatatagcatttctaataattcccctcgattatatcggtgtttttgaggttgataatcttcatcaaataaagttacttgaataattggccgttctaatttatgctcccaccatttttcaaaatcttcaactaactgttctttttttgctttagttaacataacgtacctcccacgattgcataagcaacttcacttgcactagtggcatcatctgtataataatcagcgcctatttcattacaataatcttgattaacaggtgctccaccaatcataactttaacatttaaatgttcttgagcaactaaatcaactacttttttcatttctggcattgtcgttgttagaagagcactacagcagataatttgtgcttgatgtatttttgcttcttcaacaaatttttgtgcatctacatcgacacctaaatcaactacttctaaaccttttccttccagcatgatcttaactaaattttttccaatatcgtgaagatcaccttttacagtaccgagaataacggttcccttactttgatgttccgtatcttgtaaatatggctttaaaatctcgattcccttattcatcgcccgagctgcaactaatacttcgggaacaaaaacttcttcatttttaaattttacaccaatggcatccatacctttcaacaacccctgattaagaatatccgttgctggaaagccagcttctaaagcttcatttaccaatttgacaacctttttagcttgtcctttttgaattaattcactaatttcttcaatcatttctactcctccattatctcaaatacttgatcgatatcactactaattacaactttttgatttttttctaaaattactaattcattactagtttgtaataatatttgttttaaaaattttaaatctattttaatttgttcctgatttttaagaaaaggaacatcgtcacaataattataaattaggtatacattatcctgcgtttgtaattgggatttcaaatagtctgctgtttcttgatcgtatcgctgacaccactttaaatattgttcatcttcataaacattacagccattaacttttaaactataacagctccatgaagaagacaagcgatttgaaaataattgtttaaatcgctgtttgctccccaataaaacagttaaacaatcatgcactctaactagatatacaggaatattgcgtgcttgtatttcaactaaagcattaccgcaaagtccgtataaaacaattattttttcatcccccctgctcttatcaatttctttttggatattttttgctaaagtatgtggttgattatgttgttgtatatctagatatacaaattcataattatcaagtgataagtctagttgtgaaatataatattcgtatattttgcaagcaataacttttatcatgaaaacaccatcgcatctatccaataatcattaaaatcaggatctttttctaaatagataacttttgtttgattactaatatgttgaactcgctgaaaatctcgtgtcaatattagtttataaagaccactgatagcactatttttaatatattgaactttgttagcttcttctgaactaataatattcaaggtaacaagatccgctttctccaaataatttccgaagccacccgcaatataaatagttgttacttcttcattcaattccttcaataatacttcttttcccgcttgaattgctgcttttgctaacataaaagcttttatatctttaattgataaatatacttcatcatttaaatagtattttttttgcttatttaaaaaattacctgtatcatcaataattcctaaacgtagcaaattagcgattaaagaaattaaaccactaccacagatactattagcatcttgattatcaattgttttatagacaagcttattattttcgactttagtcgcacaaacagcgccagcaatacttggaccaccacattcaatatttaccccttcaaaggcaggcccagcaggacaagatgtcgctaatagccgatgcttatttcctatcaccatctcaccattagttcccaaatccatcagtaatacattttccttgtttttatccatattagtagcataaattcccatgacaatatcactccccacataagcagaaatatgattcatagtcataacttcaatctttactgaactctttataaaataatttaaaggatattcagtcattgttaagattggtacatcaaatggtgatactccaattgtttttaccttttcttttaaaaacaaattaatcattgttgcattaccacaaactaatatttctttgatttttgtagacacattgattcgactaaatatttctttaattattagttcacctaatttatgatcattatcacgattatcaaaatcaattcgagcaatcacatcacttccaaatttgccttgaggattaaagaaagactgactttcaataatcattccgctttttaaattgagccatttcattgctactgttgttgttccaatatcaatgataattccaactttctcaacaggttcggtaattactacggtatcatttaaatatatactatcctcaataactccgtctgcttgtggcaaaataaatcggtcaccctgatgatataaatggctgcaggctaaacgatatccttgatccagctcttttttagtaagcagttttagatcatcatgattaacctcgatgattcgattggtagcttttactttacattttccacattttttttgaccattacaaggggcgataaaattacaatcttgttcctgtaaatattcaagaatcgttttcataataattttcacaaacttccataaaagctttaatatttttccatggggctaatggaggaatatcacaaccactcgaaataataaaattacgataatctttacactcttttaataaatttagtgtaatttccttgattgtttctggggttccgttactaattatttccactgggtctatatttcccataacaagacaatcctttggcattagttctagcattttttttatgttaatagcattaccaaaatgatatgctcgtgctttaatttctttaaaatcatcaatcatttttaaagtattattaccacaattatggtatacgaccataaaattttcatcttgaactgctgtaactatcttttttacataggtactagaaaattcagtcgccaaaactggcgatagcaccccagctagtggttctgccattaaaattccatcagctccagcttctttatacgctgaaatatagtcgatcaaaaattttgtagccttttctaatacaatatgtaccatttctggctcttcataacaattgatcattgcttcacttacatccattaaacgaccagccaaactaaacggaccaatacaacctcccaaaatagggatatctttaatttctgctttagtttttttgattgcatcaatatataattgacttcgcccgcttcccactgcaggaacctttaatgcctgagcatcatcttcatcttcaattaattgaccaactactgtcggtacttcgttatcagtaacctttatttctgcaccaaaacattctgcttcaaccgataaatccataaaacctaaaattgctaatggattacactcctctttaattatcttaagagctgcaacttgttgatcggtatcattaattaattttttgacactaatatttaactttgttgctgctggaaaggtaattattggcattgctcgtttatttttcttctctaatacatcatttagccatttttctatttccatcatattcacctctatatatatcatatcataaatatattattgtctatacaattttctaaaataaaaaagttatatttctataaatataactttattccggtgaaataatatttttagcctctcctaaaccatattcaattaaataatcacgaacaacattaagtgaatgattataactcgatgatatttcgtcagcaaaacattctgcttcacctaagcaaagatattctaatgcctttttacttttaatgttaattatattaatactttgcttttcacttgggtaaaaagcaaaataataaccccaataaataattttattagtttcttgtataattgttttaaacggtaacagtggtaaattgtcaactatacaattaagcaaacattccaacataagattctttgaatcttctatttcaccctgaagatttttgatcttttcttgcgtaatatttggaaaagctaaggttgcagcttttttgattaaaattaccattgcctgaacaccgtttaaatataataaagtatcttgccggtattgtttattttgcatacatttaattgcagtctgctcatcttgtatcactaccctagtacctttaacattcattgtttcaccaaaacctaattcattcaacatatgtagactttttctaattgtagaaacgctaactttatacattttagctaattttgcttctggcggtaaaaagcttcccactggataaatacctaatgaaatcttattaattaaatcacgagctatttgtgtataacaatgatctctgcctaattctgcagaccaggtatagttgggtgtcatttcttttatttcaggatatttaagagctaggtccattaatgttttttcaataacattgataactgtatcgtacattaaaccaaaacgatattcaatttcacttttatccctagttaataacgaacttgtaacccatgtaatacttttaaaagtatattctaaattaaaataattaatatatttttcataattaacaaagaatactggtcttgcatatatttctaagctggagaaaatatctcgtaataaaggattatgtgatttatctaacagttcaaaaaatattcgagtacatatccgttcacgttcctctgcactcttatcttctgattcttttaatctttgagagcataattgtaagtcttcttcatcccatatctgtgctgcaaaagaaaaaattaccggcataattaaaccaatcgttttatacacatcgattatttcctgacgatgctctaatacatattcaaggccatcttctttgaatttactatgaatgttatacacaacggttgtcgctttacgttcatgggtcgaaatatagccctcttcttttaatacgtgcaatacatctttaaccgttcgaattccaatattgtaaaattcgcacaactcagaaattgatggtagcttcgagccataaggaagacgtccacttacaatcaaatcatgaagattgttgtataaataattaaataacgtttgtttttgcttcactacgatcaactcctttatcgttaaataggcacataatattaaattacttagatttatttatataaatataattttatcacaaaaaaaatctttctactatatgcttatgtacccaattatttaattgtttatttttacggtaatgataaaattaaattgatataattttatagttgggagttttttataatgaaaaaaattggtaaaaatatagttaataaaaaaccttctatctaccctgttggtaaattaatatatatttatataattttaatcgtcataattgtcttgatgatttttaatacaattaatttaaataatactttgggctcaagtaccaatacttatgtaaacgatgttacttcacaattagcagatgatatttctatgcgaatcgaagctataaaatcttcgttaagactattatctgattcaataaatattttgcctgataatcaagagatttcttcttttcttcaaaaaaaatgtgaaaatttagaatttactgatttgtttgttattgatgataaaggcaatacaattcccgagcaatctgaaacatttgatttatcactagtaagttcatcatttaaaggtgaaaataacctaatctatcttgatggtcagagtcttcttttttctacaccgatctatgatgagaaaggaataacaaaagtacttattggtattcgtgataaagaaaatatccaaaatttaattaaacctaaaagttttaatggccaaggtctatcttgcattattgatcagaacggtaatgttgtcatttcccccactgatcttaaaccatttatgcagttagataatatctttaaagatggaacagatactgatgctgtaaatcatattaaaaaaatgcgtaaaaatatcattaatggtaaatctggtgtttttgagtttactgctagtgatgatacttctttaataatatcttatcattatcttgaccataatgattggacattattaaccttagttcctggcgaactgatttcaagtggtacaaatcaatatattttctataactttattttagttgcttgtgtcatttgtgttttctcagttcttttatatttaatttttctatcttacaaaaaacacaagaactggttagagaaaattgcctttactgatccattgactgcaggattgaataatgctggttttcaattagatgcgcaaaaattagtaaataccgcgcccccatctaattatacggttatttttttagatattaaacaatttaagttgatcaatcagaattatggctttaataaagggaatgatgttttaaaacatatttataatgttatttacaataacattagctctaatgaacttgttgctcgaagtgaaaatgatcatttctttatttgtctaaatgaatctaataaacaaattattcaaacacgacttgatatgataattgctgaaattaattcatttgcaaagaacaaagcatcacaattaactatcttgcaaggcgcttgtttaattgaaaatcctaattcagaaattaatattattcaagattatgctcgtttggcctgccgccttaatagtaagaaatcaaaatgtacttactatgataaagaaattttggataccatgaaaaaagaacaggaattaaatgatttatttgagaattcaataaaaaacaaagattttcatatgtttttacaaccaaaaattattatttctaataataaaatcggtggagctgaagctttagttcgctggttccatcctgagcgaggaactatatatccatctgattttattccacttttcgaaagaaatgataatattattaaactcgacctatatatattcgaagaagtatgtatctttttacaggatatgattgctcgtggtgaaaaaccatttgttatttcagtcaatgtctctcgagttcattttaaagataatgatttcttaaaagcatttgcaagaattaaagaacaatatagaattccaaataatttgattgaattagaacttactgaatccattttctttgataatcagcaaattgaaagtattaaagatacaattcatcaaattcatcaatatggtttcctatgttctctagatgattttggtgctggattctcatctttaggattattaaaagactttaaagtagatggcataaaaatggataaaaagttctttgatgatataagtagtcaaaaaagtaaggatattattgccaacttcattgaactagcagataaactgaatatatcgcttgtagctgaaggaattgaaactttagaacagttagaatttctaaaatctgtccattgtaatatggttcaaggctatatttattcaaaaccactacctgttgatgaatttattttatggttaaaaacaatcaaataatagttatttaaaaacaactataatgaagtcccctcttcagttggacacaaccagctggaaggggttttattatggcaaggctaacaaaagaacatatatagaaatatataataagtgaaagcagagcttgctataagtttattatcaaaaatataaaataaataagaacggtatcctgtatttgataaaaatcattaataaacacatatatgatattttgcaaaaagataagaataatcattattcttcaaaaactaaaactagaaattatcaataaagttttaatagataaacaaggcccagaatcaaattcaatcgattctgggcttacttcattttaactactcagatgtatatttaaattcggtagcatcaaaactattgacaccacaatataaaggattattttcagcattcttttcaataattgttgtttgcaagattggagcattcttagcaacttctaaatatgttgcaagttttttagatgctaaccgtgcctcaacctcaattgaacgattggttgcctctttaacttttattgtttcatgaacaatttggctcattgatcttgtgcaatcaatcttatctagtgaattaaaatagcgtttgggtaagaaaatattttcatagacaattggagttttaccaccatattgaactctctttaactgatatacttcctcatcagttttaacatcaagatatctaagtgctaaaggatgatttacaactgtttttatagagactaccttaattataactttaccataagttttaacaatttcttcatcagtttggattgatactttagaaatactacgtgactttttatttttagcaataaaaacaccactgccagactttctaattaaaactccatcttgaatcaattcatctaaagctcgacgaattgtcattcttgatactcgatatttttcagtgaattctcgttcaggtggaagcattttatcttcttgataaactccactttggatatctttaagaatatcctctttaataaatggatataaagaagccattaatgtatttttgtcccgtttggtaaattttcaacgctaattacttctaataatccctttttatctccagctaaaatcattccttgtgactcaatccctcgtagtttagctggttttaagtttgctacaacaattacttttttaccaacgaattcttccggagtataatgatcagcgataccactaacaatttgtcttgtttcttttcctaaattaatttgtgatactaataatttatcagcatccggatgttttttgcattcttctactgttccaacaattaattcaattttcttaaagtcatcaatagtaattgtattatcttcttttggttcttcttttacttctggttttgccggttgcaatgcttctactttcttttgaatttcttttggatccaaacgagcaaataacatttctggtttttcagctactttggtaccttctttatatgttccaaaagtatctaaagctaataaatctctttgatcagtattaatttgatctaaaatcttattagcagtagatggcatatatggaattaacgcaatcgctgcaaaacgaatactttcaattaagttataaagaactgtcgctaaacgatccctttttgtttcatctttagcaagcgcccatggcattgtttcatcaatatatttattagttcttcttaataatgtaaagatggcatcaagggcatcagatgacttaaattcatccatcttaccaattacttttttaggcattgctaatgctatttcaattaactcatcatcaactgcttctgtaacttttgggttattaacaattccgccaaagtatttatttgacatagcaatagtacgatttactaaatttcctaagacattagctaaatcagaattaattctttctactaaaagatcccaggtgatgcttccatcattatcatatggaatttcatgtaaaacataatatctaactgcatctacaccaaaaatgtctactaaatcatctgcatagattacatttccttttgattttgacattttactttcaccttgtaataaccatggatgtccaaatacttgtttaggtaaaggaatatctaaagccattagcataattggccaataaatagtatggaaacgcacaatatctttaccaattaaatgtagatctgcaggccaatacttttgatataattcgccatgattaccatcgacatcataccctaatcctgtaatatagttacttaatgcatcaatccatacataaacaacatgtttaggatcaaaatctacgggaatcgaccaagtaaatgaggttcttgatacgcataaatcttgtaatcctggttttaaaaaattattcatcatttcattctttcgtgatactggttgaataaattcagggtgtgtttcaatatgttcaattaaacgatcagcatattttgataatttaaagaaatatgcttcttccttagcatcatggacttcacctccacagtctggacattttccatctactagttgtgattctgtaaaaaatgattcacaagccgtacaatatttaccttcataatgacctaagtaaatatccccttgatcatataattttttgaagattttttgtacttgtgacttatgataatcatcagtcgttctcataaatcgatcatatgtagtatccattaaatcccaaattctttttacttcaccagctttttcatcaacaaactgctttggcgggattcctgcttctttagcttttaactcaattttttgaccatgttcatctgtcccagtttggaaataaacattatatccttcttgtcttttaaatcgagcaattgcatctgctaaaataatttcataagtatttccaatatgaggttttcctgaagtatatgtaattgcagttgttaaataataatctttttcattcttcatatatatttctcctttatttttaaataaaaaaacgccctaataaaaggacgaataatcgcggtaccaccttttttacacattgctgtgtcactcaatacttttaacgcaagtcaaacgattatctttaactattcaagataacagctccggggccatcacttaaagtttaactcttagtttccacctgccactaagtctctatatgcgccactttaacatcttcccatcttcgctttttccactcttaactttagcaaactctaagcctaaagtcaaattaaatttagactaataatgttcttccatatgaattatctattataaatatctatttttcatttattaaatgataaacatatgttgcccgttgttccatactatattcactagctttaacattattagctgttaaaaaattttgtaataaaactagtattgtatcatcagcttttaaaaatcccatcttctcttgggtgggaacaatagtatgtagcaattttaataagtacttctttaatttttaattatttctttgctcacatacttaatcctttctttgattcaaaatgtttcacgtgaaacattttgaatcaagcattaactctctttaatatttttttatttctgttgaaacttatttattgcttcatataattggaaaaaattacaatcttatcgtggatataattctacctcgatagcagtaataattagacatttattttaatatttaaacaatttcacaataacttacctttatttttttattaatagcgtatatcttatagaaaataatatatccattactatctaagcactcacaaatatcttattgctaacatatactactttgcccagtaatatttatagatagcaagttgtgccatactatcattgacttctttaaaagaatcaaaactaattaatgtataaatataatttttattttagcttaaccacagttattattttctttatgaatatacaatgatttaatatctaagttaaaaatctattagaaataaattattcattattattttattaataccaattattaaaataactactcttaaaacattatcatatggatttaaaaatagtttactttcctccactacacaaaatacattattttttcttcatattagctatgcttcaaataagttaatgtgatttctcaataataattacttaacctatcttcacaaaaaatatcttacaatatttttgctactctgttttatagacaaaataagcatatatactttgtttacctttacaatatgctcaatattataattcaaataactacttatcattttatatatgcttacaggttatttttttacttactactatatagtacctatatatatcatagtaatcgcctcttaaaaagtatatattatactatgtatttatatttttatactaacaactctacttagaaaagtatattaaacaaaaaatgtttcacgtgaaacattttttgttactccaaggctgattcaactctaaataaactttttgcatttcttcatcagtcttagccatcatatcggcacaccattttaaacgctgtttaatatcattattagcaacaaaattagttttataagctaattcatgctccaacgatgcccaacagtccattgcaatagttctaatttggatttctaccggtacttgcatcatcccttctctttgataaacaggtacactcacaatcaaatgcaaactacgataaccattctctttaggatattgaatataattattgtgttttatttgtattacatcatcttgtaaaactagtaattgtgcaatgtattgaatatcattgatatactggcaaatcactcgcaggccagctatatcatttaactctttaatattattaaagttcttactaaacccctttctttctaatttatctaaaatactttgtggagatttgattcgactctgaatattatgaattggactatgttcacatttaaatttcaattcttgatctatgatttctagtttagtctttacaatcataatagctgcccgataaggttgcatcaattcttcaaaatgcctctgttcttgaaaagcattaatcatttcttgattcatttaatcaccccaatcatgattatattaaacaattgcataatagatacattaaaaatatggttttttgtgtaaaaaaaattcgctagcatatactagcgaaaaactgttttcaaatctttatattgtttaagcgtatcaagagtaacaaattgataaccacggttataaagttctcccaaagccatttctaatccctcaacagagaaattatgaatatcatgtaataaaactactgcaccatcatatgaattattaataatagtctcttttattttattagcatcttttaacttccagtccaatgtatcaacactccatagagcaatttccattccattatttttgactactgattttacattatcattgaaagcaccatatggtggtctaattaatgtaggttcagcaccagtaatcttataaattgcattttgtgtatcaacaatttgtttattaagtccttcagcatccaactttcttaaatctggatgatcccaagagtgactagcaatctcaaaaccatgttcatagactgtttttaccacatcaggatataaagtaatatttttccctaattcaaagaaagttgcacgaccattatatttttcaaacatttcaactacttttaaagtatttgttttgtgtggtccatcatcaagagtgaaagcaatcattttcttgtttggatcaacttcaggctgagcagcaggtcctgcaacatctaaaggtgcatctgaaggtatattcttattcgctaatttgattaattctttattatctttataattaacttcaatcttgtttttcaaatcttcagtagtgtaaataattaatttatctttttctactgttaaattgttacttttagcatctactttatcaattccttgactactagctaacactgttttaaaagtatttcttaaactgtctccaacagttagaatcttttctttttttgtatcataagtaaataatttttcttttgtttctactactttgtcatcttcatcataacgaatagttttaaattttaagttaataaactgattatatacttcattgattgagtagtccatgtataatatatctttactatttttattaatcttttgttcttttacataattttcttgataatctttaacaattttatctaaattactgttttttgtctttggataatataatgaaataaagaaactatcatcgtctttttcatagtgttctactgttccaaatttcttgttatctttattatatactttatacttatcatacggtccctcgcggttaataaaccaaaatattcctcctaataaaattgctataacaacaattactactagggcaattgttggttttttctttaattttcttctattatttattgcgtgcctatactccataactttcccatcctttcgccatacatataatacgatatttgtcgaattaaatcaaatttattgtattgctaataaaacatcttttttaatgtttcacgtgaaacttttaagaattttatttaattgaaaaagacgaattactcgtccttttgatgatatgtagcatatacttcatttttcttaatatttcttaatttagcaacctctttaattgcatccttaacagtcattcctttgctaacatattcatcaacatgttcaacaatagtttgctcaaaaactgtctcttctataacattattattgccagaaacaacaataaccatttctccctttaaatcaccagcaactttagtaatttcacttatagatccacgtaaaatttcctcatgttttttagttatttcccgacaaagtgcaattggtcgatctccaagaatatcttccattaatttaagtgtcttagtaatacgatgcggagattcgtaaaaaacaatcgtttcttgataattctttaatacctgcaactcttttttcttcttcttatcttgatgatctaagaagccataaaataaaaatggttgcggagcaattccagaaactactaatgcatctaaacaagcattagccccactaattggaattacatttatctcattatcgattgcagcttttactaattcataacctggatcagaaatagctggataaccagcatcactaactaatgcaatattattaccatcaagcaacaaattaatcaatttaggaatcgattgccctaaattatgctcatgatgggaaattaatttagttctaatattataatgatttaatattttaacagtatttctggtatcctcagcaccaatataatcaacttcctgtaaagttctaattgctcgataagtcatttcttctaaattaccaattggtgtggcaactaaatataaacatggccggtcattttgaaaacttttttgtctattcatcaatattttctccaaacatttttcttacctcattactataactaccatctgcattatgtgcatataaaggtggttcaatttttaatcctttttttcctttatacattccttcaactaataaaacatgactgtcgcgatcaatcttaggataaacaaaacgaattctttttggttcaatatcatacttttgcattaaattcaaaatatcaatcatccgatcgggacgatgaaccatggcaaactttcccttattatcaagtattcgagcagcactctttataattccttctagattaatcttaatttcatggcgcgcaattgttaaatattcattttcatttaaattactatcctcatctactttgaaaaaaggtggattacaaataactaggccaacttttttagcatctttgacatattctgcaatatcagcgtgaacaatattaatctgtgtttctaaattatttaattcaatattcttaattgctaaatcaactgcttctttttggatttctatcccagtaatcggacgattggttcgctgtgataatagtaacggaattgccgcattattagtaccaaaatcaataatttgtttaacatctttagttatggtgcaaaaattagctaataaaacagtatccaaagaaaaattaaacatatcttttctttggataattttcatattattataagctaataaataatttaatacttcttgatcagacattatttattatctttttgtttaaacttaatttcatcaagattaacaaagataattgcaccaccattatcgatcttaacaagatcattaataacattaagtcctaatactttaacatcttttccttcatattttactcgactgccaattttaggaaaacgttgtttctcaattgtataaacttcatcttcatacttaagacagcacatcaaacgaccacaagctccagatattttttcaatattaatagctagcatttgattttttgccatattaattgatactccattaaattcaccaagtaatgatgtgcagcaaagtggtaatccacaagttcccatcccacctattacttttgctttatctcttggtcctatttgtcgtaattcaatacgacatctaaataccgtagctaattcttttaataattctctaaaatctacccgtacatctgatgtatacataaaaatcacttttgccttatctagtgtaaattcgcaattagtcaattgcatgtctacatcataacgtgaaataatatcacggcaagtaactagagcttcttgggcatcaattatatttttcttataggcttcaatatcacgttgtgtcgcttttcttgtgattttttttaattctgtatctaaattaaattcacttattgattttaatgactgtgaaatctcaccaagttctactccacgtgctgtttcaactactactttatcacctttatctaattcgatatctgttgaaaaataataaactttaccagcacttttaaatttaacacttgccaatttaattttttccataatatctcccttctatagtctatacatcatactatccatcagcatcggtacattagcattgctttcgatagtataaatagtttctaaaataatttctatttgtttaatcaattgactctcatcaatttttatatttctcaaaaattcttgatgttcacaatatacaatatcatcagtatgtttcacgtgaaacatatctttcatcgctaatactaacatatttaaaaacaattttatatcatcacgctctttatatttttttaataaattagtctgagtattaataatcaaattagctctctttaaaaataaatcctcaataaaatttattacttgcaattgcatatattcaaagcgttcatcgtataaagtcttagcttcttctatactaggggccaaataagctaaaatatgagcagattccttagtaatgccatcttggcacaaagcaccaattataacctctttgctatcaggcttgatatcaattacctgacatctagataaaatagttggtaatacccgactagcattattagcagtaaaaattgcataaatcccctcggttggctcttcaagcatcttaagtaacgtattcatcgcttcttttgtagcatattcaatattctcaattatatatatcttagcttttccttctaaagaagactttttaaaggtatcttgaatcagttcaatattacccttttttatagaattatctttaccattaaatcgaataatatcactatatttattttctttaactttacgacaatcattacaattttcgcaagctaatgtttcatcacaaatcaatgacattgcaagataagtcaaaggaatgttagtattatttccaattaataaaaaagcatgcggaatccgttgttgtgaaaattcattttttattaaattataaaaaatcggttgattcttttctatgtactctttcataatttactcttaattacatttatcacttgcgcaacaacttcatcgattgtcttacttgcatcaattttagtaattcgctcagcatacttttcacaaatcgtcatataaccattataaacatctttatgaaaatcatcagattctaaatctaagcgatctgccactcgctcaccgttattgatccgagctagtcctacttcatatggcaagtcaaagaaaatagtagcatcaggtttaatattaccaattgcaaactgatttatctgataaacttcctctattcctatttttctccctacaccttgatagaccaatgaactatcaacaaagcgatcacaaattacaatatatccatcgttcaaagccggagctactttttcaactaagtgttgacgtcgagctgctgcatataataatgcctctgttcgtgcgtccattgtaatattattagtatctaaaataatcttccttatttgttcagctatatcaattccaccaggctctctagttaataatactttatatccttccatttggagctgttcaacaactatttttgacacagttgtttttccactaccatctggtccttctaacgtaatgaatttacccttcattttatcttcctttcaatctttaaatcaaaaacaattcacactaaattataccatatgtgtggttttgttacaatttaatagtttttttagcactctatacttgacagtgctaaaaaatgtattataatataagtgtaatccaaaggaagtatcgattacatgaagtaatttcaattttgtattattaacaaaggagatggtttatatgaaattactacctggttttgctacttttgatgatgtttttgaaaatatgtttagtgatccttttttcaaaggaacaagtactcatatgcgaacagatgtaaaagaagtagacgataattatgtacttgatatggagttacctggttttgataaaaaagatatctccatcgaactaaaagatggttatttaaatattacagctaataaatctactgatggaaaggaaactgataatcaaggaaatatcattcgtcaagaacgttttactggtacttgttcaagaagtttctacattggggatgaagttaaacaagaagatatccgagctagttatgataatggtgagttaaagattacattacctaaaaaagctccaaaagaaattacaacaaacacatatattcctattgaataaaaaatccggttcccggattttttataataatgagatgatataaattacaataattcctggtaaggataacattgagagtacaaatatattaataaagttatagctaaaataattatttgttaaaatatttaaaatcaataaaattacaaaagctcgagtaattacaaataaaactctacgcataaaaagacacctcatataaatatatgaggcgtttatattttctttcttccttctaacgattttaacaatgttaattcatcagcatagtcaatattacttcctattggtaatccgttagcgattctactagtattaatattcttttttgataataatttagctaaatataaagctgtagtttctccatcacgagttggattggtcgcaataattacttctttaatcgagtcgtctaaacgctcaaataaacttgcaatatttaaatcatccattgttttaccatccattattgacatagcgccatgtaagacatgatataagccatgatattcttttactttttccatcgcaaaaacatccttaggatcctcaacaatacaaatagtcgtctgatcacggtctggatcttgacaaatatcacaaatttcaccttcacatatatgaccacattttttgcaataatgaattttggtttgaatactgccaattgctgcagaaaattcatctacatattttttatccattgataaaacatgatatgctaatcgttctgcactttttccaccaatacctggcaaacgcttaaaacaatcaactaaatcttggaatgcttggggataattcatcgtaacctccttttattcttcaaactcaaccaaatcaccaaataactcaaccgccatagcttgagcatcatttagttcagctctcttttctttaaattcaccaatatgatgtaaaacaattggctcaggtgcgggtaatgttcccgcccgattcatatcaatatactttgagcgcatatctggccaaagtgaatttttaattgcaataaaatcataattttcaccaagaacctcttttaaaaaattctttaactgataataattttgagtttcattcacctcattaacatttggttgatgctcaaaagctacaattattcctcctggggcagcagcaactggcttaccatcacataacattgaggcaaatttagcagtatttaaattgaatcgatatctagcaataactgtccatttttctttaatatcatttaaaacccggcgatcagcttgaactaaaatatttaaaatatcactaaaagacacctcaatattttctggtgatttatttacaataatattctcatcaatttcctgggaaatatcttccccaacaggcaaagaaacatcactattacttataactgtttccagagtttcctcagcaacttcttcaggaaccaccgtttctgtaatatcatcagtcttagcttttaattcttcaggaatactttcttcaatttccggatcatattcaataacccctttatttaactcttcctcgataatctcatcttcaattacttcttctggaagtgaatctgtttcctcaaccacaggtatcgctttagcagtatcttttacaggtaaaatatttacctgttcaattgctttagaattatcaattgctaatttattttcttctttaatacgattacatattttaagcatagccaattcaaaatatgtattagcatctaaagattgactgtaatgactgctagcttcaattaatatatcaataatttcaaaagcttcttctaccaaaatatacggtgccaaattatcaacatcttgctgtgttaaaacgaataaaattgaaacatcttgagtatttttataaatgataatatcctttaatacatcaactaaatcaaaagtaagccgcttaatatcgatactgccacttaacatattatcaagggaagtcaaaaccccttttatatctttagataataattgtttaataaatgaaattttattatccattgatagcaagccatataccatattaacactttcaaccgtcaactcattattatacgccaaacattgttcaagtatacttaaagcatcccgcattccaccttcagctaatttagcaacactttcaagtgcaggtaattcatattttttattttcagattttaagacatattccaatcttgaaataatatcatggttttctactttcttaaaatcaaatcgttgacatctagaaataattgttggcaagattttatgcggttctgtagttgctaaaacaaaaacaatatgagctggtggttcttctaaagtttttaatagcgcattaaaagcaccagttgacatcatatgaacctcatcaataatatatactttgtatttaccattaattggtgcatattttactttatcaatcaagtctcgaacttcatcaaccccattattgctcgcagcatcaatttcaataacatcaggatgttccccaacagtaatagccttacaattaggacattgatcacatggaggattttcaccagtacaatttaatgctttggctaaaagtttagctactgttgttttccctgttccacgtggtccggcaaataaataagcatgtgaaattctattttctttaatagcatttttcaaagttgttacaatatgttcttgaccggcaacttctccaaatgtttggggccgatatgaccgatataaagctttatatgacatcactaatcactcctcattcttatttattatactatattatctaataaaaaggataaaagaattaacttttatcccgcttacgtttgtttttaaaataatcctttatcacttttgagcatttatctcctaataccccggagacaatcacgggctgatgattaacaggaatatccgattgataaatcgtagttagggctaaccagcgtgattcaaaagcaccaaatacaactcgctgaattcgactattaattatagcaccagagcacattacacaaggttcaagagtcacatataatgtacactcatcaagataccatgagtttaatgttcgacaggcttcttcaattgctattatctcagcatgtgccgttgctcttttactggtttcacgaagattgcgtccacatgcaataatctttccatctttaactatcactgctcctactggcacttcatccatatctaaacattttaaagcctcttgatatgcaatttccataaattcaagatcttgatccatgactttctcctttatacaaaaaaccactacacatagacggagattcttaatgctgctaccttccggtcctgacatggttcgaagccgcctattgtaatggcaagtatgattataccgtatctatataataaattcaatcatttttaatattgaatctataaaattattttcaatttacaacataccttaaaaatattgatcactaatataaattataaatttctcactacattttaatcactattttttctaaaccataattaaccataaataaaatttattttggtacaattataactaattctaacgatagttattttctatactaacaactgtagtcaggatagttttaaatagttttttcaatcatttctctaattgactactcttcatgatatcctttccctgatatcaatataaaaacagatagttttccctctatctgaatgatagaaacaagtagctttccctctacttgtttttattttaaatataaattcattaaataagtatcataatattttaaatacacatatatttgtcatatgttctgatgatttcaaagtctaatttattagataatcgtaccgctttatcattgttaattacttaataccaataatcctttaacactgataatactttcattccttcaagtgaatgatcaccaattattttactatcgtcttcaacaagtaatattaatgaattcaaataatttttgaacctaattttttcaattttatctgtttcattaaaatcaaactcaacaattacaaaacttacatgtttactctcgctatgacaattggagtaaataaaaaccacgcctaaaagacgtggttttctctgaggctataagcctatgttgcttgctcgcgtctcaaggcgctgctttctcttcgttcaagctatcgcttttgactctcgccatccctcaaagggatttatttcctcctttctccttttgttatcttcttctctcttttttgttttctttcttcatttctttatcttcaaatggattttgatattcttttacactcaatttatccattgctatatcatgtccctcttgttcccttatatattttgcgactgtttgatcatttagtcctactgtactcacataatatccttctgaccaaaaatgtctatttccatatttatatttcaaatttgcatgtcgatcaaatatcattaatgctgacttacctttcaaataccccataaatgatgatacacttaactttggtggtatcattaccaacatgtgtacatgatctgacatcaaatgcccctctataatttccacccctttatattgacataatcttattattatttctcttatatcatttctaagttgattatatatcacttttcgtctatactttggtgtgaagacgatgtgatatttacacatccacttcgtatgtgccaatgaatttgttttttgtgccatacttaatcacctttcctttcttataatgacagcttgaacaactccattatatcggaaaggtgatatctttgtataacttctttattgctccacccgcatagcaggtggttttttatttcgcatacttcgtatgctcaactgacttaagtctatatgttcaaattttcaatttgaacaggtaataaaaaacaaatagagttattgccctatttgtttcttataaatataaattcataagataagcatccacataatgatcatcgattttcataaaattttcatatgttccgattacctcaaaaccatacttttgatataaagcaatagcattctcattactcgtaacaacttctaattcgataatttcaatacttgcttcagcagcatatccaattataatagcgactaacttactacctattccttgatgccaataactttttaaaacacttacacccatttgcgctcgatggcttaatcgtgtcttttgattaccacttagtgtggcaattccaacaatttcatcgccatctttggcaactatcattacggaattaggatcttcgtgaatttccttgattaactgcatctcctgtacttcattcaaaatacattcattcaaaccaaaagttaagttatcactttggccagctaccacattcaaataattaattattttcaatgcatcactaggtactgcttctaaatattcaatttccattcaatcaccttcttgtaagatgattatagcatatttacttctttaaacgtatctttgtgacaatttgtgtagcaagatataccaataaagtaaagccgaagataattagcatatcaattaaaataggtttaattgatccaaaactaaaatcagttaatttaataatttcattatttgctttaataaaccaatatgatggtaaaaattttgctaaacttaaaacaaaaggacttaacatactttgtggtacaaatgctccacaaataaaactcgaacccataccaaagagatttcctacaccacttaaaatttctcgattacttgtaaatttagcaatcataaaactaaacgcttgaataaatatcattagaactagtgaattaagtactaaaaataatccattcattgtcaacatcgcatctttataaagaataaaactgaatcccacatataatagccagatagctaatccaactgtataattacctaacattagctgacgattcatacttttataactaactggtgaaactaaattacgccgtttgatcttttcttcattgaaagaaaccatgatcattgtcacaattaccattgttattgttattaacatataattagagaaattataataagttgccggcattgtaaaatcaacctcattttgtttatctaacatccccacttcaacttttttatttaaatcttctttaattaacttacttaactcagtatcactaattcctgcttttaaatataaattagctgtatttaaatatttattcaaaagattcttactataaatactactatatgcatctggcaattccattgtttcaatagttacatctttaccattaataaaatcagtagtgtaattatctggaatgatcataatataatcaactgtacgataaaataacgcatcacgtaaagattcattatcatcttctaaactaattaattcgccatgatctttaatataatctttaaaaccattaattaattccgtatttttatcccgatttataatagcgactttaacatccatacttttatagtcagtagaagtagaattataagttcccgtaaaaattgctaacccaaggaagatagcagtatatgccaaaatcataagtgtataagtattagcaatttttagatattttttaaatactgtcatattgcttcctccttgtaaagaatagtgatcctaagattagaagaactccgattacaaataagcagatcatattagtagtataacgacttaaattatcataatagtataaagcatataacccatcagtaattaaacttactggattaatataagttaaaataggaagatttgtttgcatccagtatttaatatcaatgatcatcattcctgaaaagaatgataaaactagtgaaaagcttgataaaaatgatattttagtatcttcttttttaaacttaagaacatttccagcaaaatttcctaatcctactccagtaaaacatccgattgcaatcaaaagaataatataacccgtctgttcaccaaaaccaacacctaatccaaagatcaggtaagccattaataccatcattattgaaaattgaataataaaggcagataagattcccgataaaaccgtaacgagttttgaaatcggtgatatagtaattcgagttccttgtctagatagatttgcttcaatttgactagttgttctaagtccacagaaactagcatttaaacagttcatcccaattaaagtataaaaatatactactgttaaatccgtgtttccaccaatattctgattttcaaaattatttttagataaattgactgtatttaaaatattagattgtaatgcacttggatttaatgttgctatattttcaacagtgctcattgtactgttatactcattaacaatactttccaaaattgtttcatcaattcctgtattatttaccactaactttatttcattactaacaacataataacccgtaattttttcatcttttaataactgctgggctttatctaaacttgtgatttgtaaatcaattaacttatcatcacctttttccaattcctgcaatgtttctttaaattgtgaattagcctgctcttcaacaagtgcaactttaactgtttcaaattcttcacttgctgttaaattagcaaatgctaggttaaagaaagtcgctagagcaagtggaaatactaacgtccaaaatattaccatcttgttcctaagcaatgttttaaattgatatttaaagaaatgatagaacattaatctctcaactcttttcctgttaattctaagaatacatcatttaatgtcggacgttcactaaataaactagtataattaacattgttttctcgaacataatcaattaacttacttaaattatcttctttcgtattataagatatatgaatagtattattttcaatctcaatattcattacacgatcactatttttaagctgctcaataaatgtttgattcattgattttaattcaatcgtaattctctccccaagagtaatcatattttttaattcatctttagttccagatgcaattactctccccttatcaataataataatttgattacatagctgctcaacttcttccatgtaatgggttgtataaactattgttgctcctaattcatttaatcgtttaattccctctaaaatattatttctactttgtggatcaactgcaactgttggctcatctaaaaaaattaattttggcttatgcgctattccacatgcaatatttaatcttcgtaataatcccccacttaattgctttggtttaaatttagtaaattcgtttagactaacaagattaattgcatcttgaacatagttggcacgaatttttttatctttaatatataaaccacaaaaataatcaatattttcaataacgcttaattcatcaaatacagctacatcttgaaaaacaacaccaattttactttttatatcataagcagtaggactcatctctttattaaaaatcttgattgaaccagaatcatactttaataatgataagatcgtattgatagttgtcgatttaccactgccattaggtcctaataaccctaatatttccccttcataaacatctaaactaaagtcatctaaagcaattaaatcaccataacatttagtcaaattctttatctcaataactttattcatctttactcctccttacatcatcactatacgtaaaacttttatttcaaaccaccaattttagattgcagcatggtttcttttaagcaactattagttgcgatggcggtttctttttaatttttcatttatttttttagcatcttcattatttttcataaaaacgactgcttttacaaaaaaataaacagttactgacataaatgtaacacctataaaattatctaattcaataatactgtttgtatatccacataaataattagcagtacagactacaaaagctatttctataattgaaagtaaattggttaaccactcctgtaattctaaataatgagttacgtttatcaataagtttacgattacacaaacgataaaaatcatcacaactaattcattagacatattttgatgattgaaatgaaataataatgtttgcaataaaattacaaacgtatatgatacacaagtcgtcaacatataaaatttaaacatttttaatttattcatcttatcacctacattccaaatttttccttaaaactgcttacataatgacgtgtaataattaacctttcacgattaattaatagcgcttcataacgcccatttaatagagctcttacattatctaatttgtttaaatttagcaatattgatttactgattcttacaaacaatcgggaatctaattgatcttctaattcatataatcttaggcttgtttcatagactttatcttcacaataaataaaagcacgatcttcatttgcttctaaataataaatatcatctattttaatttgataactacgattgtctaattttccaataataaaatgtttatcttcaaataaagaaataattcgccttacttcatcatcaattttattacaacgaattactacttctaattcattatcttcctcacattcaatgagcaccttcatcgaatccctcctttattaacaccttatcatataatatcttttttacctatctaattttggtaagatgcacatagattagctaagatgcaaaaaaagaatgctaaaacattcttttatctagataattgatatatctgaattttttcatcaaaaagatattgatagcccgaaataaatctaccaaccagcagagcagataacactgttcccataccaattccataaactggtatctgtaagactaaacaaagcaagagcgtcataataatcatagtaatatcaaatacattttttactaacgaaaattttagattatatacttgcgagatagtcttaaccgttgattcaactggtgttgcaataagattacagctaactgaaaagtatactccaagtgaaacaaaaataattgcaatcagtaatagtagataagcagataataaatttgaacacctaattttaattaaagaatcataaaaatcggtaatatatccaaagattaatgaaaatggaatttctaaaaaaattgtaatagttaattttctaactaaacaaatctgaacaataattaaaatcaaatataaaataattgaagcagttcctaatgaaatattgttgaccttactaaaagcataaaaaagattagtgaacgcagcaacccccaaatcagtgcgggtattcaaaattattcccaaagccaaaatattgattgatagtatgtagatgatccaacgattaacatttttattcatttatattcctccatcaccaagatagtaatatattaatcaataactttctaatattaaaaagatattatataataattaaaagttattaaaggggaatatgaaatgaatcttaatcaaataaattattttttagcaatttgtaagacaatgaattttactaaagcagcacatgatctatatatatcgcaaactgcagttacaaaacagatacaattattagaaactgaattaggaactaaattatttaatcgcaataataaacaaatagaactgaccgaagctggtagattttttttaattgaagctaaaaaataattaatcaatttaatcattcaaaattaaatattgattctttcttaaaaggacaacaaggtacaattaaaattggttttcttaaaaatttagatcctcaattattggttactatattttctgattttataaacgaatttcctaatataaaaatagaattaacaagctatgcaaattatcaattatatcatgcgcttgaacaaaggatgatagatatagtcctaggattatcatttcctaaatatcctgactatcaaaaaatattaataaaaaaatatcctttaatagtattaataaataaaaataaccccttagctaatcaaaaaactgttagccaagaggagcttccaaatattttatttgatgttagaaaattatactatcaagataattatcctgaatttgaatggaatttattaaagattgcctgtaatcaaggttgcgcaattttgcatgcctttacaaaagataattgctataacgattatcttaaagatattcccttaacaccattaagtgaaaaaagtgtttatctaatctatgatcaagataattataatccactgatcagtaattttattaattatttaaaaactacttcgatattaaatcataaaaactattttttatcttactgatttatttagtgtttataacatgctccttaagccagtgagcaacaccatcttcatcattacttttgataactgctgtagcttgttgttttaaagaggttactgcattagccattgcataacattgatcagatattgcaaacattggcaaatcgttgattgcatcaccaaaactaactatcctgtcacagtttaaaagttctttcaactttaaaatagcacttgctttagaggcacttttaggcataatttctagccagtattctttacgatatatttcttgttgaaaagtaatattataatctaaatcatcctttaaactttcataagctggtcgaagattatcataatctccaattatggtaaaatagaaaacttcaccctcatacaaagataagtaatctaatgttaaattaattcgataatcggttttacgcttactaagataatattttcccccttcatgaaggctttcatttattatcgttactcgttctttttcatttactagtgcatataccataggttttaattggtttttttccattattgcttttatatgcgctacttgttttgaattaaaaatattcttatgaagcagttttccagtttcgccattgacgataaatgtaccattatagattatcaaaggaagatttttgattaatcctcttgttactggtgaagcggaaactagagaacgagcagtagcatatgtaaaaatcattccctcattaattaagttattaattgttttaatactgtaatcactaatttttccttggctattcaatagcgttccatctaaatcacttatataaagagttttcatatagataaaaagataactatttagttatcttttccttacctcccatatatggttgtagtgctttaggaatatttacactgccatcttcatttaagttattttcaaggaaagcaatcaacattcttggtggtgcaactactgtattatttaaagtgtgagcaaaatattttccattttcaccattaattctaatatttaatcttcttgcttgagcgtcagttagatttgaacatgaaccaacttcaaaatatttcttttgtcttggtgaccaagcttcaacatcaatacttttagatttcaaatcagctagatctccagaacaacattctaaagttcttactggtatatctaatgatctaaataaatcaacagtattattccatagtttttcaaaccacatcttactgtcttcaggtttacatacaacaatcatttcttgtttttcaaattggtgaattcgatatactccacgctcctctattccatgagcccctttttcttttctaaaacatggtgaatatgaagtatacgtatatggtaatttatcttcttctaaaatgttatcaataaatttaccaatcattgagtgttcagaagtaccaatcaaatataaatcttccccttcaattttatacatcatactatccatttcttcaaaactcataacaccagtaactacattactacgaatcatatatggcggaataacatatgtaaagccacaatcaatcataaaatcacgagcatatgataaaattgcagaatgtaaacgagcaatatcacccattaaataataaaaaccttgtccagcaactctcccagctgcatccatatcaataccatcaaaattttccattatttcagtatgataaggtatttcaaaatctggtacgactggttccccatatttagtaatttcaacattctcactatcatcttttcctaatggaacggattcatcgataaaattaggaattttcatcataattgcttttaactcactaccatattgagtttctaagtcttctaatttagctaattcatctgccattgcacttacttgtttcttattattttcagccgcatctttatttccttcacgcataaattgaccaatttctttagataatttattacgtttacttctcaattcactagctttagttaaaacttctcgataatctttatctaatttgtaagcctcatctactaatccaatcttgtcatcttgaaatttctttttcatgttttctttaactaaggttggattttctcttaatatcgcaatatcaatcattttaattctcccttgcttatatatattctttaaaattatacaataattatgcaccttattcaattattatcaagatgtttctcttttaatcatttgcttttagactagaaaccatgtcgatatgttttattcttaatgaaataattttacttattacccaggaaataactaaagtgcctaaaattgcatataagtaagaaggtaaagcaatgaaattaattacatccattgtatcttgaatcgttgatatcatgtattcaatcaataaatatcctacaggcaaacctaataaaattcctatcattgataaccatatattttgttgaaccaagattttttgaatctgagtatctttaaatcctaatacttttaatgtagaaaattcataataacgttctaagtaagacagtactcctaaattatataaaataattccacctaaaataattgcacctaaaactagaatgataataattaggatcattgcctctaataaaacatcaaaactttctaataagtcctgctgatactgaattgaagaaatatttgttagattggtcaagcaatcttgatttttactcccaatgattgcagtgggatagtattgatgaccagtttgcaaatattcttctttcataatcgtaattccttggatattcggggttctaataattaaagatattttagattgatattcttgatgatctaaatttcctttccacttaattatatctcctacctttaaatcaagcttatcggctgttttttttgataatgcaattccttcttttaaagatttaaaattacttaaatcttgagcaagtttgatataatcattattttccaagactgttaacgaaacatctaaattttgttcatcaattactattttagctgtactctctaataatgtctgtcctttagtctggtttaaaagataatcaatttgctcttcattaagattatcatttaaattaagtttatatttataattttgtaatttagtataattccaatcggtcaaattagtcattgtatcatataggccacaagcactaaataataatgcagtgcagcccaaaactccaaaaatagtcataagactccgtaatttattacgaataatatcacgaatattccattgaaatcgaaatggtagattactgctccatgctagtgaataacttgaattactaattaaattattgctataaagaattgttgcaccattcatttttaaatatttgaaacagacagaaaaactaattaacatgcataatatagtacagccaattggtaataaatatcctaaaactattggttggctagttaaaaccggtaaaacatacatttcttcaaacattggataaatcaaagctggcattattattaaaccaagccagtaacctaatattgaaccaactaaacaaataaatgttgaatgtgataaataatggatcagtagttttcttttcttaaaacctaatgcttttaaaattcctaactgcattcgttgactttgcaaaacccgatgcattgttgtaatcgtaattaaaacagcaataaataaaaaagctaatgaaaaaaccaaacctatcgagcgatgctgggcaatctctccagtcaacatatttacactaggatgatctttttggagaattagcttgtattcattaccagctaataattgatcaactattttactaatgtctttttttgaggaaaggactagttgattcggatggtataaagtgttaggaaaactattattatttacatatgcaaaaccatatttttgacgatttggtgtcagttgatctcctttagccaaatagatattttcaggggaataaactaaaccaataattttcttacttaattcaaaattctgatattttaaagttatttgatcatttaaccgataaccatttttcttagcatacattgcatcaagccagataccatcatcttgattattaaatgatttaccattaacgactttaagagttgaaattttattactatcagtaatatagagatcaatattactattatcaaccgctttattgcttgtagagacatacattctttgttcataatcagtctgtttttttagttcattaagagtcgaatcactaaattccttttggtaaagccaagcatcagctaaattattctctttaatatagttatttaaagctacttcaagtccatgatattcactagatatacctgaaaagataaaaacacctaaaaacatcataataaatatagctccaaactgaaccttatttttccataaatctcgaatcatttttttaaacaacatttaccattccacctccatcacatcaagaggatgagaatttgttgtaattgtattgatttgaccattttttactcgaattactttgtcagcgatagcttgcaaattagtattgtgggtaacaatgatagttgttttatgatattctttacacatatcatgtaataacttcaatacttttgctcccgtatcactatctaaagctcccgtcggctcatcacataaaagaatctctggatttttgaccactgctcgagcaattgaaactcgctgttgttctcccccagataactgatgaggaaattttttcttatgcactaatagtcctacttgatctaaaacgttatcaactggcataatatctttttttagttccttcatcaaggctacattttcataaaccgtcagtgttggaattaaattataaaattgaaatataaatcctacttgatgagctcgataatctgataattcattttcatttttattcgaaattacttcattatcaataattatttttccttcatcaagacgatcaattccccctaaaatatttaataaagtacttttccctgccccactcggtcctaagataatgacaaattcacctttattaatagtaaaagaaaccttatttaaagcataaatttttttatttccattttgataaatctttgatacttcttcaaatttaatcatattttctccttttttgcataataaaaacatgtattcaaaagacaatgaatcatcactgcaagtttttatttctcttcgttaacaacaatgcctgtacacaacattttgaaaacttttaaaaattcttgtttttgcatttcaagattatcatgacttactaatacatgcttaatacaatcaataaacatatttgtaataatatcaatatacggcgaattgatatcttcaatattaagatgccatgccatatgttgcttaaattttaaaagaaaccaatcccttttttctttatattccgtcgtttttaattcaaaaaggataattaatcgttcatccattatatatcgaaaatcactttcttcaaaaaaatctccaaattgatcaagtgcttcatcaacctcttctagtgaatgaacttgaatttcttcatttagatgaacctcaactaacttatttaatgacttaattgatggctctaatacagctcctaataattcttctttattagtaaaataattatataaatttcccaaggtggtatgtgatttactagcaattattctcattgaagccccttcgtagccatgatgcaaaaattccactttagcagcttcaataatatcattctttaaatcttctttttttatctgcatcttctcaccccacaacaacatcatacgtgatattaatagctaaaacaatcatcaaagctcattaaaaatcattagttaacaaccgttcattattaaaataagggcctaaataatttagcccttattttttcctattcttttttattaaaaaattgatcaaaatttttagccataattatagccatatctgaattagtatcctttactcttatcataagatcaaataaattatattcacccgttttaattcgacaatgtaatttatcatgggctgttttctgtcccgctcttattgaagtgagcatatttaaatatttattctgatcttcaggtaaaataagcgcatcttctaataatttttcaggaactatttttgctcctttaggtaaatcaatactaaatttatcatccatatataaactatccatccgattatttctaacatcaaaattccaaacatcaacagccaacactgataaaataaaattataacgatcttttaatttttccgcacgttcttgttgttctttaagagtattaatattagtgataattccatgataaatgattgttccatcttcttcttgacgataaaagtttgcattgatattatgccaactgactttaccatttttataatatgagcgataatcaaaatttacacaacttttttgtttagataattctataaattgtttagctaaaacttctcgatcatcttcataaactaaatcaaatcctttattatgtttcagtatatctgttaactcagattgttcaaaatcaaatattttagataatccatgactaaggaatttagtggtaatatgatcatcttttattttaataacgacaatatcccctggggtattttcaataacaatatttaaattatcttccatctcattacagtgttgttctagcatcatttgttgatgatcaacagtgctatcgatacaaaaaacatcagctactaattttccattttctctgtgaatattagaaaaatagatcgttagccaaatcttttgtgcagttttggaatttacttcaacttcaaaataatcgattttaccagctttaatctgttcaattacatgattacataaaaaataagcttctttactaactatctgacttaaatcattattgattggcggttgattaaaatcagtacgagtatacccaatcgttttataaaaaccatctgatgcaaataaaattgttcctttgccatcaagtgtcattttaccaattccaccgttaatattttttaataaactatttatattttcttgtaattcatgtgattttaattcattcactttttcatttgtaacatcataaaaacaacataaataatatgaaccccactctggactatcaactaatcccccatacatattaatatacacggttttaccatttttagctttgattttaaactcaactaaatttttagaagaacgatcagctaatccattatgatagaaaacatgtttaaattcttcttcgctataaaacaactttttaggccattcaattcctccacttagcaattcttctcgactataaccacttaattcaaccaaactatcacttacaaatagtagttctaattcataactgaatccagccaccccaccaggaataaaattaaagatagaattagtaatagctttgatttcactttgagaaatattgtcaacagaagtatatttaaaatcatctttattccatggtaaattaaatttaccgtccgtttcatcaatcattttttcaaattctactgtgctaactggctttgaaaaataataaccttgaactacattacatccaaaacgtttcatatataaacattgatccaatgtttcaactccttcacaaataattgttgtctgtaacttattacaaatatcaacgattgcaggaataataatattattgcgattattatttgactctcttttagttatatatgaacgatccaatttaacaatatcaaaatttagatcttgccaaatattcatccctgagtaacctgttccataatcatcaatcgaaacacgataaccaaaacttcgtaattcatcagctacttctctcaccttggttaaattcttcaaaataaccgtttctgttaattcaaattccaataaatatggaggaatattatatttattaacaattttattaaccctagcaacaaaaccagtttcataaacatgcattcttgacatattcattgatacaggaattagttttttaccttgatcaattctttctcgaagatacctgcatacttgctgacaaataagaaaatctaagtcaattattgtttcgtttttctccattatttcaataaattgatcaggataaataactttattatctttaataaggcgggctaatgcttcacttccaacaatttttcccgtattaatattaactttaggttgaagatagaatgtaaataatttattacgtaaagcattttgaatctcaatttctaatattttacgtttattaataaatttctgcatatcttcattaaaccaaactagtttacaatgattatcttttttagcttcttttcgtgctatattagcttgatcaattgctttaatgatagctttttcttctaatttaactggacacaatcctgctgctacagcaatctttgaatccgggtgatgttcttcttgcgatgaaataaaagtttctaatttttgttcataattccttgttacagattcaatatcacaattatcttcaaataaagatagtcttaaaaaatgatctgaaaaaacacgtccacataaaattgtccgtggagacatacttaaaaatttagcaaattctaaaagaaaacgatccccttcaataaaaccataaaagtcattaactaattgaaaattagttaaatcagcgtacataattacataatttttactattcttattactttcgataatatcagtcgcctgtttaacaaattcagtataatcgtttaaataaaaattatgactttcttccattttaacaccacctttctggtcacactctattttcattatatcaaatataaccgttatttaatataattataaaataaagtataaagaaaaaggacacttagtccttctttgctttaaaattataaaaatatttggttataaaaataaatatgaataaggcaattattgcaatcacaaatgtcaatacaacatttgtagtaaaaccagcaactaaatatccaacaacacaagctccagcaactaacattgcgtaaggtatctgagaagtgacgtgattaacatgattacattgagctccggccgaagccatgatcgtcgtatcagaaattggtgaaatatgatcgccacagactgcccctgctaaaatagatgcaatcgcaattacaagcatttgtgaaccttcggggaaaatcgaagtcgcgataggaattaaaattccaaaagttccccatgaagtccccgttgcaaatgctagacctgttccaactaaaaataaacaaaccggtaaaattgctgtagagatactagctccctgcattaaattataaacaaagaccccagcttgtaatttatctgacactaaatcccctaaagtccatgctaaagtaagtataatcatcgctggaaccatcgttttgaatcccattggtatacatttagcaaaatcttcataactaataatctttctaggaagatacaaaataaagataaatactagtgtaaaaaatgatcccaagaccagtcctcttgaagcatcgcagttagtaaaagccgtaatgaatgatactccttcaaagaaaccacctgtgtataacattcccacaatacaactaatgattaagaaaaaaactggcaataatagatcataaacccgcccttgatcagaaacttccatttcttctccttcttcataatcatttacaccattatgcacatcaccattttgagcagctatttcatgatgtttcattgttccaatatgaaaatctttcttaataacataagtcaccattacgattgttaataaagcatacaagttaaagggaattgtttgtaagaataaactaaaaccatcaccacttgtataaccacttacagcagccgcccaactagaaattggagcaataatacagattggagccgcagtactatcaataatataagctaattttgctcttgaaacactaaattcatctgttacttcacgcattacacttccaactgttaaacaattaaaataatcatctacaaaaattaaaattcctaacaagaaggttgaaaatagtgagccttgtcttgattttattttttcttttgcccaaagtccatatgctctacttccacccgctttagtcatcaatgtaactataattcctaaaaatattaagaatattaaaataccgatattccatgtatcacttaaacttccaatcattgtatcaaacataacattaacagtatcaataatatgaaagttacttaacagtaaagcccccgaaacaattccaaaaaataatgataaataaacttctttagtttttaatgcaattaaaattgcaatgaccggtggcaataacgcccaccctgtttgtacaaaatccatcttttcctccataaaaaaatactttaattggcaacaatcaaagtacttatatactaagatagcgctccacatgaatgtgacaggaaattatatcttctataatcccccaggtaaatagtaattggtgttactatttccttcggcaaatcaccctttcgcaaatgctgtcaccaaacattacattttgctactattgatcattgcacctctaccaattatttaattttatcctccatgagtttatcaaagcaatttgttcttgtcaataaaattgttctaaagtgagaacattttatatttatttaactattgacaggaacataacgtcacttgctagaatgaaaaagcaagggaggtgttatttatcgaatacacatataatcaattttgtcccaatgccaagatactagatattgggtgtggtgatggaactatttggttaaataatcaaaataaaatttctaataatatttcgattactttagctgatatttctctgaaaatgcttgaagaatgtcaaaacaatactcaacatttaccccaaattaaaacaattgaagaagctgattgttattatttaccatatcttgataaaagttttgatgtcgttatagcaaatcatgttttcatgtattttgacgacttaccaaaagcattacaagaaatcaatcgtattttaaaagatgatggaattctctaatgttcaactattgctaaagatatgatgaaagaaagagatgttatgttaaaagattttgattcaaaaatctcatttaatcaagaaattttatatcaaccctttggttatgaaaatggtaaaacaaaattagaaaaatattttcaagatataaaattatatgatcgaaaagaggtttatgaaataactgacttggatctttattatcaatttattttaagtggtaaaggtctaagtcttaatcttgagccactatataaaaagaaaaaacaactatatgaatatatgcaaaaatatttaaataaaaataatcttttttatttgactacccatgccggaatgtttgttgcaagaaagaggaaaaaatgaagataattggtagtgattttgacggtacaattactacaaataaagtaattctacctgaaactagaaaacaaattaaacaatttagagatgctggtaacatctttattatcgtaaccgaaagaagtcctcagaaattcaaagatggtattaagaaatatgatattgatttctttgattatgtcatttgtgctaatggagctgttacattagatcaacaactaaaagtaataataaaataataaccgcaaatacgatgtcccagagtattgtaatcaataacctagaagatttagaaaatataagaaatgaaattatttcgtttgccttagaatttgattctattgcccaaagaaagcagtatacatttggccaaattgaaaatattaatgtctttcataatacccgctatactgatattttagctaaagatatttctaaagcatctgaattattaaaacttttctatcaattaaaagctgagcaactttatacaattggagatggtgaaaatgatatttgtatgctgcaatgtactgataacagttttacttttaatcatgttgaaacagttattaaaaatagtgcacagtatcatttcgatacaatagaacaaatgttagcttttattaatcaaaaataactctcacaattaagtgagagttattttatattccaaattcttttgcatatttaacttcgccactaattttaccagctctaaatatcagtttttttgccataaaattaattgaaggaattcccttaggccctttgattccaaattgttcagctggtaaatatccaaatcgtggataatagtgctcactacctaaaactaaacaatattcatatcctaattctttagcaatttgatggcctttgttaattaaagcactaccaatcccttgtttttgaaatgctggtaaaatagctaatggtgctaaaactaatactgtatcatttccaacttttgctgttgtaaacataatataaccaacgagctgattatcaattttagcaactaatgataatttttgaatataattattaccagtccttaaagctataactaaatcttgttcatttccatcactatgttcagctgttgcaaaagcggcttttactacagtatatatttcattaaaatcttgtttttcttctggtcttataatcattttattttcctttttcaaagaattaaaagtatcgctaagcgatacttttaattctattcttcttcagatttatcttcttctgtttcagcagctttttcaactacctctactgaagataccttgttttctgcatttactttaattaaacgtactccttgtgtagctcgaccggctgttttaacttgttccattggtaaacgaatcatgattccatcgtcagtaatgattaataaatcttcatcgccattaacagcacgcaatgcaacgatttgaccatttcgctctgttgcattaatagttttaacccctttaccaccacgatttgacaaacgatactcttctaatggcgacatcttaccataaccacgttctgtcacaaccatgatatatttaccttctttatcagttgtcattccgataacttcgctaccatcaacattgattcctttaaccccactagcacttcgtcccattggccgaacattagtttcttcaaaacgaactaatttaccgttagaggcggcgattaagatttgatcattaccacctgttaatttaaccgaaactaattgatcatcatctcttaagcttatcgcaatctttccagattgacgaattcgttcaaattcattgatgtgaactcgttttactaaaccgctagcagttacaaagaataaataataatcattattttcttcaatttgcttacgattaatactaatcatcgatttaacttgttcttctttatcaagatttaataaatttacaacaggtaaacctttagccgaacgtccaaactctggaatattatatccttttaaacgatatactttaccaaaatttgtaaagaataatagatcatcatgagtcgacatattaattaacgaacttacaatatcatcgctattagttgccattcccttgattcctcgtccaccacggttttgtgttttgtatgtatctactggcattctcttaacatatccattattagttaaagaaataataacgtcttctactggaattaaatcttcgtcttctaaatcaaatgttccttgaataatttccgtacggcgtttatcaccatatttatctttaatttcttctaattcatcatgaatgatcgataataaacgttctctattttctaggatatcttttaaatcagcaataatttctaataatttatttaaatcatcttcaattttttgtctttccaaaccagctagacgttgtaattgcatttctcgaattgctttagcttgtttatcagacatattaaattcttccatcaatctagtttgaatgatttcagtagtacgacttgatctaattaaatcaataatagcatcaatttgatcaagagctctttttaatccttctaaaatatgagctcggtcttcagctttagttaatctgaatttagtacgtcgtttaattacttcttcttgatgatcaaggtataaagtaatcatttcctttagatttaatgtttttggttcattattgaccaaggcaatgcagttagccccgaaggttgtctgcaatgatgttaatttatataattgattcaaaattacttctggttgaatatcccgacgtaattcaattacaactcgaataccatcgcgatttgattcatcacgtatttctgtaattccttcaattttcttttcccgaactaactgtgacattttttcaatcatccgagctttattgaccatataaggaatttcagtaacaacaataacttttttacttcctttttcttcaatttccgtctttgctcgcatgacaattagaccatttcctgtctcataggcttttttaattgctgttttacctaaaatataaccaccagttggaaaatcaggaccttgaatataattttccattaattccatgattgtgatatccggatcttttgcaactgctaaaattgcttcaatcacttctactaagttatgaggtggaatattagtagccatcccaactgcaatccccgttgaaccattaattagtaagttgggaatacgagccggtaaaaccgccggttcctgttcttcaccatcatagtttggaataaaatcaattgtatcttcctttaaatcacgaaccagctcactagatatttttgacattcttgcctcagtataacgttgtgctgctgctccatcaccatcgattgagccaaaattcccatgaccatcaactaacatataacgatatgagaaatcttgagccattctaactaaagcttcatatattgaagagtcaccatgaggatgatatttccccataacttctccgacaatacgggcagatttcttatatggtgtacctggagtacatcccaaatcactcatcccgtaaataattcttctttgaactggttttaacccatctcgaacatcaggtaaagctcttgatacgataactgacatcgcatactgcataaaagagtttttcatttcagatgttagttttacttttctaattccccgttcttccattatttatctcctttatcttaaatatctaaatcagtaacgtatttagcgttttcttgaataaattcacgtcttggttcaactttttcacccattaacatatcaaaaatcatatccgcttccattgcttcgtctaaatcaatttgatttaaaattcgtttttcaggatccatcgttgtttcccaaagttgttctgcattcatttctccaagacctttataacgttgaatactatatttagcaccttcaccaatcttagttttcaaatcatctagttcttcatcactataacaataatattcatctttaccatgtttcaataaataaagtggtggttgagccgcataaacaaagccaccttcaactaacggtcttaaataacgatacaagaatgttaacattaagattctgatgtgcccaccatcaacatcggcatcggtcataattacaattttatgatatcttaatttatctagattaaactcttctccgattcctgtaccaaacgctgtaatcatagaacgaatttcagcatttccaaggattttttctaatctcgatttttcaacgtttaaaatttttccacgtaatggtagaattgcctgaattcgacggtcacgtcccattttggcactacccccagcggaatccccttcgacaataaagatttcacattcactagcatctttacttgaacagtcagctaatttacctggcaagtttgaaacttcaagaacattttttcttcttgtcatttctcgagcttttttagctgccattcttgctcttgctgcaacaatagctttatcaacaataatcttagctgtatcaggattttctaataaaaatttatctaatgatgcgctaataatattgctggcaatttttcgaacttcagcgttacctaattttgttttagtttgtccttcatattggggatcaggatgtttaaccgaaataatcgctgttaaaccttcacgaacatcgtcaccagataaagcttcttcatctttctttagcagtcctttacttttagcataattattaataactcgtgttaaagctaaacggaaaccttcttcatgagttcccccttcatgagtattgatattattacagaaggaataaatatttgattgataaccatcattatattgcattcctacttcaattgtaatttcttgctgcatatcttcaacatagattatttcttcatgaatcggtgttttatttttattaatataggcaacatattctttaattccgccctcataataatattcatgttttcgatccacaccgttacgttgatcttctaacgataaacgtaatcccttatttaaaaatgctaactctctaattctttgtctgagtgtatcataatcataaacagtaccctctttaaaaattattttatcagccttaaaagtaacaattgttcctgttatatcagagtcaccaataatctttaattcacctgctggtttcccaccattttcaaaacgctgataatattcatgtccatcacgatgaacatttacttctaaccattctgaaagcgcatttacaactgaggctccaaccccatgaagtccaccagatactttgtatccgccaccaccaaattttccaccagcatgtaatactgtaaaaattgtttcaactgttgagattccagtcttagcatgagtaccggttggcattcctcgaccgtcatcaattacttgaacaacatcatcatcctttaaaattacgcgaatatgactagcatatccagctaatgcctcgtcaatcgagttatcaacaatttcccaaactaaatgatgtaatcccctaattgaagttgtcccaatatacattcctggtcttttacgaaccgcttcaagtccttctaagacttgaatatcggattcatcataactatgttctactttttcttctgacattatgtagcctccttgccacccttaatatagattttttttgccttttcaacaatttgatgattaattccatcaattgaagttgttgtaataaaagtttgaattttctgattcaaaatatctaataacatatttttacgcgcttcatctaactcagataaaacatcgtctaatagtaaaacaggatattctcctatttcatctttaatcaattcaatcaacgcaatctttagacttaatacaatcgttctttgttgcccctgtgaagcaaataaatctgcagcattgccattcataaagattttcaaatcatctttatgaattcctaaatgactttgcatatatcgaatatctcgctgatgattttttttatataatgctaaaatattttcatacgttaactcttgtttaaggaaacaactgtatcgtaagctaattttctcattatcatttttagcaattaaattataaatagaagttactttttgatttaaattcttaataaaatcaattctttttttaatcaactctacttgcaatcgtgccatctgttcgtcaagtacttctaaatattcatcaccatcacgattcttttgatttaaaatttttaaatacttatttctctccttaagtaaattattgtatttacttaaattaaaaacatagataggtgagatttttgataattctaaatcaataaaacgtcggcgattatttggactgcccttaattaaataaagatcatcaggaacaaaaactacgacatttaaaagaccaacatattcactaattttataaatatcctggtcatctattttcgcacgtttaaaatcactcccaagaatcatttctaaactacggagcttattattggaagtgacttcaccttttactttcgcaaattcgcaatcaaacataatcatctgcttatttatatgagttttaaaagattttcctactgacaataaataaatcgcttcgatcagattagttttaccttgtccattactgccaattaaaatattgatatcacgatcaaactcaataaaaaaatgattataattacgaaaattgtctagacataatgaattaactttcattaatcaataacaaaagactctccattaaattctatctggtcaccagttcgaagtttcttgcctcttcttgtttccacttcaccattaaccatcactaattcatctttaataaccatcttagcttcgattccactagaaacacatcctgcatactttaaaaactgtcctagggtaatatattcatctcttatttgaatttttttcatgactatcctctttttttataaaatctagagttattataacataaattgttgttaaaatcaaaaaaataagcattttaacgcattttttataaaaatgaataaaatcttattttttattaaaattcgctcatatttaaaatttatccacatataaataaaacaactagtaaaaaaatactttcacgaaaaaaaaagctacataatgtagcttagaaagttcttactggtaaaactaattgaattacatcatctttttcaaaatctttaataataaaaggtttcatttctccagtaaataaaattttaatttttggttcattaaaagctctaattgcatcagttgcatattttgaactaaatgagatacttattggtgttcctttataaaaagatttatctaaaatttcttctacagaaccgatttcttgcatatatgatgataggacgactttttcgtcagacatatctaatttaataatattattttgttcatttgttagtaatgaaacacgatcaatagcatttaatagataatgagcatctaaatctagttcataatcaaaagcatcaggaattaaacgattagtatctgggaaagttccatcaattaatcgtgtttgaataatattattatcaaacacataaaggactttacgatcagaaacatacatttcaatcatttcatcacgttcaataatttttgaaatttcatctaaagatttttgaggaattgtaatattgaaagtaacgtcttcatctaaagatacaattttcttagctagacgatagctatccgttgctgtacattctaattgacgatttcctgctttaaagttgattcctgttaaaattggtttgtgctctttatcactagcagcaaatttggtctgtgaaataatatcttttaaagatagtgcatttaataatacttttgttccagtttttgataaatcaattcgtggataatctaaaacatcagtaccatttaagtcaaatttagaagttgctcccgaaattctagttaaagcaccatctaaaatctcaattttaatttcatcactatcaatcttacgaacaatatctaagatataacgagaatttaaaactaccccaccagtttgataaatcgttaaatcttcatctttttcaattttagtttgaattgtaatgtcagaatcactaccagttagaattaaacaatcgtcttgtaaatcaaacttaattccagtcaatactggtaagggacttcgaattgaaactgctttagttgctttagcaagagcatttaataatttaagtcgttttattttaaaattcataaatttcctccttgtgactaattatatataattatttaaaataatgctattaatattattatagtgtgaatattgtgcataagcattaaataagctgatataatcagtgttttttatgtgtataactatgtgtgcaatttgtggtagttttgtgtctaaacgatacctaatttgtcttttaacttatttattgctaatttgtagtcaggatctttcttgattttagtttctacgcgagcacatgctttcattactgttgaatgatctcgattgctaaaagtagccccaatttcagcaaaagtaatatctaataattcccgcattaaatacatacacatttctcttggggttgttaatttacgtgtcttattttttgaaattagctgactgattgtcagataatagaattctgcagttgtttttaaaatactttctttagttagggaactctttggattttgaacaattttatcatctttaaaagattctaatgcaaaagccatatcaatattattagtatgattcataatgctacagaagaaaagacgttttaaagccccttcaagactacgaatatctttacaataatgattagccataaaatcaacaacatcatcttgaataattaaagaaggattatcaagattttctatctttttttctaagatagcgcgagctgtttcaaattctggcggatcaattccgaaacttaatcctgaattgaaacggctgattaaacgtgattcaattccttgtaattcttcaggcatcttatcacttgtaataacaatttgtttattattattaattaattcattaaaaatgtggaaaaatatctcgctgcttttttctttattgaataaaaattgaatatcatcaattaataaaatatcgagatttttatacttatcatagatttcatcaccatcacggcctttcattgccccaataacttcatcaacaaaatctttacttgtaatataacgaattctaagcgctggatttacttcttttgcataatttccaattgcatttaatagatgggtcttacctaatccaggattactataaataaacagtggattaaaattagaacccggattagtagatactaatagagctgcattttgtgccatgcgattagaacttcctacaacaaagttatcaaatgtcaaggtacgattcagattatctctaaatggcgtttcttgtttaacggcaacagattttttaaagtcttcttcaccaacgatttcaagattaattgatgaagctaacatcccagaaagaatatcttcaatgtctttttggttatttttaattgtttcaacattaaatgaaaatggggtggtaataataactttgttattgttaatggatgctatttttgcacttcgaaaaacagattccatgattactttatcgattttacgttcttctggcaaattttgtttttctaaagtgtcgaggcataattgccaaatcttactattatcgctcattttttaacctccgcaaacctcattataagttaataaaatgtaaatttaaaggataaaaacagttaaaaaagagtgttcacaaagttattcacaataattgttacatttccgtaggtttttattagaaattcacaatattcacaactttacttgtgcataaagatttatgtgaatgtgaaaaatgtggctatctagttatctagaaactactgttcataataaactcacaatagcatatttgttattccaagcactttgagagtttttcacatttattcacatagtaaaaaataagggtatgactttgtgcataagttgtgtgaagtttaggttaatttatgattaattagcaagattcgtcgagaaagaagtcacaaaataatgttactttttatcgaaaatcaagaaaatccttataaattaaggtttttttattcttaatagcaaaaagaaaagcacaatttaatgtgacttttgtacaatataaactattttaataaatctgaattaataaatttgtctaaaaagattttttaaaattcacattattttgtgagatttgtaaaatgttagattttcctaattatactttttcccgtaatttcattgacttaacgagctttttcatataaaatggtgaggcatatgttatttgtataaaagtataaaaaattttggaggtgtaattaatgaaaagaacatatcaaccaaataagagaaaaagatcaaaaactcatggttttagagctagaatggctactgtaggaggaagaaaagtacttgcacgtcgccgtaaaagaggaagaaaagtcttatctgcttaagaaaaatccactttacggtgggttttttttctaaaaatttatgaaaaaagaatttagagtacgaaaaaatgaagattttagccgtattattaagaaaaaacaaagtatggctaatcgttctttcattatatattacctaaaaaatgatttagatcatgctcgaattgggatatcagtaagcaaaaaacttggaaaagcagtaattcgtaacaaaattaagcgtcaagtcagaatgatgcttcaacaaacaattaatttcgatgataattatgattatatagttattattagaaataaatatttagatttagatttcaattctaatctaaatgagctaaaatatttatataaaaaaatattaaaaaggatggaaaaataaatggtgttagataacaagactaaaaaaatcttaaaagtattttgtttagttttcttagttgctatcttgacaggatgtgcacaaaatcttgatgcaaacggtaaattaattgcttctagggcaattacaagttcaactccttggtcatttgatgcagggtggtttgattttatctttgtaattcctttagctaaaggaatcttattcattaatgattatgtaggaaatgtagcttttggggtaattggggttacaattatcgttaatattatcactttacctattatgatcaaatcaaccgtctcaacgcaaaaaatgcaattattacaaccagagatggaaaagattcaacgtaagtataaagggcgtaaagatcaagcttcacaaatgcgtcaaaatgcagagattcaaaatttatataaaaagaataatgtaagtatgtttggatcatttgcaacattccttacattaccaatcatgtttgcaatgtggcaagcagtacaaagaattgatatattatattctacatatatttttggaattaatttaggggctaagccaatcagccatattatggatttggatattgcgtatattgttttattggttttagttgcaggaacacaattctttgcaatgcaaattactcaaataatggcaaaacgctcaccaaaatatcgtcctagtcaacaaatgaagtcgatgaatacaatgaacaatgtaatgacgatcttcattgtttacttagctgctacaatgcctgcagcaatgtcgttgtattggattacaacaaatgttattaatatcataagaacagtatatattcaattattccatattgagaaagcaaaaaaggaagttgaatcaacaactactaattttctaaataaaaagtaggtgaaaatatgaaaagatatacggcaagaacagttcaagatgctgtaaatacagcatgtcaagaactaggtgtaacaattgatgaattaaattatgaagtaattagtgagacaaaaactttatttactaaaaaagctgaaattgagtgttatacaattccaatgatccaagaatatattgaaagttatattcgtcgttttattggagatatgggatttgaagtggaaacagtttcttatctacaagatggtcgtatttactgtaatattaatactagtaataattctatcttaattggaaaagctggagttattctacgtgcaattaactttattgttaaaaatgccgtaagcaatacctttaagaaaagatttgaaattagcgttgatattaacggatataaagaagaccgttataaaaaagtagcatcaatggctaaacgttttggaaaacaagtattgcgcacgaaagctgaaatcaagcttgatccaatgcctgctgatgaacgtaaagtaatgcatcaagaactttctagatttgaacatattaagacagaaagtcatggtgaaggaaaaaatagacatatggttatttcatatgtagattagacacatgttatcatgtgttttttctttaaggagtgatatgaagatgaatatagaattagcaagggcaactgatgtaaatgagatcgaagcgttatatggagcagttgtagacgatttactagccaatgtaaattatcctggctggaaaaaaggaatttatccaactcgtgatgaagcaatttttggaatagaaaaaaaagaattatatgtaatgcggcaaaatgatcaaatagtggggagtattgttattaatcatgtccaagaagaaaattatcaattagcagcttggaagatagatgcacaagatcatgaagtttatgtaattcatactttagctgttcatccacaatttaaaggattaaaaatagctcaaaaattattagaatatgctgatgaattagctaaaaataatggggtaaaaacaattcgtttagatgttcgtaaaggcaatgtgccggcaatcaagctatatgagcgttgtggttatacatatgtgggagcaataaatcttgattttaggggttctgatcttggcttatttgaattgtatgaaaaaataatttaaataatgcttgccctatagttaggtttaagtagtatgcttaacttaggaggacgacttcatggataaaatagttattaatcaagaacttttattgctacttcaaaaaaataaaataatcgccacaacgtcaaactttaattaccgggatcaagcagtcatatcactaatcaaaacattgattactatgggatataatagtagtgatatcttagaattgattgatgaagaaatgactttgctggatattctagaatttcatcaagatttggtaattaataaacaatatgaatgctgctgtttaattaataaattaaagaaaatgattgaagaagttaaggaagagaccaatggaatatacaattaaagaagtaactaaaaagtacaatctaagtgcttcaacacttagatattatgaaaaagaaggattactacctaaaataaaaaagaatcaaagcaatcaaagagtttatgatgatgatgatctatcgtggttagacataattatgtgtatgcgtaaaacgggaatgacgatagcatatataaaaaattatattgagttgtgtcaagaaggtgacaatacgattaatcaacgatatgaaatttttttgaaacagaaagaaatattattattgcagcaacaagagttggaaaagaatattgagacagtgaattataaaattaatctatataaagaaaagttattaaaatagatagcaagaattattgctatctatttttctttcaattataatcaatataataagtaggtgataagatgaataaaaataaattattaatgttctttattattaatggactttttaatttagccgctaattatgctcatccaattactccaacagtaataaaaaatcttcaactgggagattatatgtttggtgttgcatttggggcaatgatgggattaaattttttattttcaccattttggggaaaattaaatgaacaaattaacagtaaaacaacgatgttgatctgtagtattggttacgcagttggtcaagttttgttttggcaagcaaattcacaaaatagtgtgatatttgcaagaatgttttcaggcgtttttacaggaggttcttatgtaagttttttaacctatgtcgttaatgttacaccacctgaaaaaaggggtcaaaatctaactgttttagcaacagttgcaagtgtttgtgctgcttttggttattttataggggggatgcttggggaaatctcaattgatttaacttttgcagttcaagcagctactttagctagctgtggtattttcttttatcttttttgtgaaaatgatgttgtttcaccagtcaaacaaaaagttgctctgctcataaaacaagcaaacccttttaattcatttaaacaagcaaaagtatttatagataaaaaatatttaattatgtttacgatctgctgccttgcatttcttggttttactgcttttgaacaaagttttaattattatatcaaagatatttataatttaacatcaggttataatggaattatcaaggctgcaattggaattatttctttagttgctaatggtacgatttgtttatggatcattaagaatactaatgtttctagatcgtcaatgctgattttattgttgagtagtgttacgatgttaggggttttagcaacaaataatataattatatttattgtgatgaatataattttctttgcattgaacgcaatcattataccagtgactcaagatttagtagctagccgttctaatgatactaatagtagtattgtaatgggattttacaacgcgataaaatcattgggtggaattataggtgccttgatggctggtttcttttatacatttaatcctcgcttaccatttatttttggttttgttgctttccttttagcaactgttttatcatactactattatcagcaaaataaattgcacaaaagttaaaacattgttataaatgttttgattttttttatttaacaagagtagaataaaattataggaaatagtaaagctaatgaatcatgatgaggctacgttttttagtataattagtattatggtaataaataagattaaaaataaataaatctggttagcttaatgcttgcacaaccagatttagcagaaattcattatttcaaagaagtgtgttagtatgtagaagtaaataactaaaactaactatattatttttgatgttttgttgaaactaaaatattttttattaatacttcattatctttagttttttcaaacatatttaataatgaatcagttgcttgttcgatcgtagtttgatctaaagattttcgaattatttgcattgcttcatattcatctttgcttaataataaatcttctcgacgagtaccggatttttgtacgtcaatcgcgggaaaaattctcttttcttgtaatttacggcttagtactagttccatatttccagtacctttaaattcttcataaaccatatcatccatccgacttcctgtttctattaaagcagtagctaagatagttagactaccaccttcacgtgtatttcttgcagctccaaataagcgtttaggaaaataaaatgatgcaggatctagaccacctgataaggtccttcctgaaggggtaacagttaaattatttgctctagttaatcgtgttaagctgtctaacaagatcattgtatcatatccttgttctgttaagcgtttagctcgttcaagggtagtttgtgcaactttgatatgactttctgatttttcatcaaaagtagagtagataacgtcaacattatcagcatccaatgcttctttaatatcggttacttcttcaggtcgttcatcaataagtaagataaatatcttgatgtttggataattttttgatacagataaagcaatatcttttagtaatgtcgtttttccagcttttggtggtgcaacaataattcctcgttgaccttttccaattggagaaattaagtcaattagacgcattgataattgttcattatctttacctaaatatactctttcattaggataaatcggtgttaaaaattcaaaagcaattcttttttttgcttgatctggattttgtccgttaactaaatcaactcgcataagtgcattatatcgttcaccatttttagaattacgtgcatgaccaactatttcatcgccattttttaaattaaagcgtcttatctgtgattgggaaatgtaaatatcacgactttcttgagtataatttttaggtcttaaaaatccatagccatcaaccattatttcaagaattccagatgctaattcacccaattcgtcttcttctttggtatttaccttatttttatcattttttatactttccatagtatctccttcttattgttttattacaattaatattcattataatttagcttgctagtattatacaataaaatttattaatattcgtgattgtctttttcattatttgcaaatatcattctaaactaattaatatcgtggtatgattctatcaatgaaagattgggggattatcatggatattatggtagttattaaccaaatgattcaattatttttaattattggacttggttattttatgcaaaaaaagaaaatattaaatgatgaattaaatacgaaactaaattttattgttatttcaattactacaccagcacttattttttcatctgtttgtacaacatcgattagtgaaaagagtatggtcatttatactttagcaattgctacagcagtgtatgtggccttaccggtcatcagttttgttttagttaaattaatgcgaattccaatgcaccaaaaaggattatacatgtttatgacaattttttctaatactggatttatgggatatccaattatgaaagccttgtttggtaatgacgcagttttttatactgctttatttaatatcctttttaatttagaagtatttactttaggcgttattttaattaattatgggaatgatgtaaaaatgaaattaaatcctaaaaatttactttcacccggagtagttgcttcaattattgcaatatttatttattttttagaaattccaattcctgatgtaattgctaattcatgtggtatggttggggacatgacaacaccattagcaatgatgatcattggggcaaccttagctaatattaaagttaaagagttgttcacagaattaagattatactactttacgattgttaaacaagttattttaccaattgctgtttttccaatcattgcatattttatcaaagatccattgattcaaggaattactttggttaatttggcaatgccggtcgctaatagtgcagttctttttgctaaagaatatggtggagatgttgaattagcagcaaaaagtatctttattactactctggtcagtgtctttacaattccgttaatagtttcattattgcttgtttagtatacttttatattattaagtaaagaacctcgtgaatataacgaggttctttactattttgattacagaaaatatgtgattaggggatattaattttgggagaggtcaatatccccacttagattatatcaaaccaaaatagtgttatcaaataaaaaaagaccaaaatggtctaaaaattaaatttttacttatgaataaagttattttttgaaatatattataattatttgaaaaaaataacatttaatgtcacaaataacaagttagggctttcattcccaaacaaggccaaagtattgtttaaataaatgtgttatgagatagtaaatatgtacttgataggccatcaaagtaaagcagaaaaagtagaaagagagataaacaaaaatgaaaaaatatagtgtttgtattgttggaggaggaagtacctttacattaggttttttaaaatcattctgtcgtatgaaagaacagttcccattaaaaaaattagttttatttgatattgatgcagagcgccaagaaccaattggtgaatttggaaaaattttatttaaagaacaatttcctgaattagatttctcatatacaactgatattaaagaagcatatgaaggaatggattttgtgtttatgcaaatgcgtgcagggggattaccaatgcgtgctaaagatgaacatattcctttaagcatgggattaattggacaagaaacatgtggagcaggaggaatggcttatggacttagatcatgtgttgatatgatcaaagcagttcatgatattcgtaattatgcacctgaagcttggatcttaaattattcaaatccagctgctattgtagctgaagcattaagaagagaatttcctgatgataagaaaattttaaatatttgtgatcaaccagaaaatgttgttcgttcatgcagtcgtttattaggttgtgattgggaaaatttagatcctgtatattttggtttaaatcattatggctggtttactaatatatacgatattaaaacaggggaagatttattgccaaaattgagagaattaattaagaaaaatggcttcttaccacaagatgcggaacaaagagatcaatcttggttggatacttatggtatggttgaaactttaatgaatgattttccagattttttaccaaacacatatgatcaatattatttatatccagattataaagcagcacatttagatcctaattttactagagctgacgaagtaatggcaggacgtgaaaaacgagtttttgatgaatgtcgtgaagttatagctgcgggtgttttaggtgataaattcgatgatattagtgatgcccatgcagaaatgatgatcaatgtagctgaagcaatcgcatataataaaaatactcgtcatattttaattgttgaaaacaatggagcaatcgctaatatgcaggatgatgctatggttgaagtcgtttgtgaattaggaattaatggaccaagaccaatgcgtgtaggtaatattccacaattttatttaggattgttagtaaaccaagtttcttgtgaaaaattaattgttgatgcttattttgaaaattcatatcaaaaagcattaatggcatttactttaaatcgtttaatcaatgatggtaaaaaagctcgtaaagtattagatgctttaattgaggctaataaaggaatgtggccagaattaaaataaaataataaaaggggattagtatgaaaaaaaataaagtaatggatttcttctcggctttaggaagaagtttaatgatgccaattgcggctttagcagcatgtggaattattctgggagttactgcagctttacttaaaacacaagtagtagaggcagtaccatttctacaacagccagttgtattttatatcttaaatacactaaaaacagtatcaaatgttgtttttaccttaataccagtattatttgctatttctatttcatttgggatggctaaagaagataaagaagttgcagcatttgctggatttattggctattatactttcttagtaagtgcaagttgtatgatcaattctggttttatgaattttgattcattacaaatttcaactattttaggcgtagaaactttagatatgggagcagtagctggtattttaacaggggtgaccgtagcggctttgcataataaatatcataaagtagtattcccagtagcagttgctttttatggtggtaaacgttttgttgcaattgtcgttatcttagcaatggcgttattaggacaagtagcaccatttatttgggcacctgtatcagctggaattaatggtttgggtacattgatttctgaatcaggtttattaggggtattctcatttggatttttagaaagattattaattccaacaggattacatcatgttttaaatggtatttttagaactactgcaatcggtggggtatatcaaggggtagaaggatgtttaaatattttcttgcaattctttgatagtgttgatattagtgtaatgcgtgaatatacacagtttttgggacaaggaaaaatgttgtttatgatctttggattacctgcagcagcctatgctatttataagacaagtccaggtgaaaaaaagaataaagttaaagcattaatgattgcaggagttgcagcaagtattgtttctggaattactgaaccattagaatttgcatttatgtttattgcaccgccattattcttattccatgcggttatgggtggtatctcctttatgttaatgtcattattacaagtagcagttggaaatactggtggcggtattattgatatgtttatctggggtgtcttccaaccaggatctaattggtattggataattattattggtccaatctatgcaattatctattataatgtatttaaatggtattttaaccgcaaacatttatcaattgaagttgcggaagatgatggagacaaggatactaatgatactgcgagtattagtgataaacaacaagcgctagcaacaaaaataattgaaggcttaggaggatttgataatattattactgttaacaattgtatttctcgtctaagagttgatgtaaaagatatgtcattagtaaatgaagaagaacttaagaagacaggaagtatgggaattgttaaaccatcagaaactcatattcaagtaatttatggtcctaaagtagaacaagtagctaattcagttagagaagttttaaaatactaattaaaaaggcaacgaatttaatcagttgccttttctaaagctaatttttgagcagttagttcaataattatttgcataattgtaaagatacctagccttgaatttatgtctacgccatgataagttagattttcatcattactacttaaaacataatcacaagaatctactaatgaacctttagcgttagatgtaagtaaaataattttacagtcatgggtcttagcaatcgtaactacttcatcatatatctttccagcattgtttgctgatacaataaaaattgtagcaggagcctttaaattattaaagacactttttgatagatgaagatcattgattaaaatacaattaatatcaatagatgataaaatagtttgaaaataatcagcagccactaagcttaaactcctacctacgacatagatcggttgaggactacacaataaatcaacaacttcttcaataatttcataatttaagtttttaagattatcaagaaaacgagataagggcttttcaattatcatttgataatcaatttcttgatgcatactttgctttaattcatattttagttcattaaaaccagataagcctagcttattacaaaagcgcatgattgaagcattagacatatacgttgcttttgctaactgtgataatgtcattgatacaacttccttacaactattttcaagataatatagtaactctttttcattttcagacaaatctaaagatttagcattttcaagtaaagcaatcattattccttttcctttctaactaaataagttttaaatattacatcaataatatagaaaattgctaatcttgaagtatattcagtatcaatattttcacgatgattaacaaaaaaacgaaaattaatatttgctaaatcagcaatagcattcttagtatatggactaattgctataattgttgcatgatttaaattaaataatttaacaatcttaaccgtagtgggataattaccactagtacttatagcaattaatatatcatcttcattggcattactagcaatatgtgctgctaaacgagatgatttatacttgtaaacattttgacgaccaattgaaaataacaatttttcaagatagtcgacagggattcgggaaataccttcaccatatagatggattcttttattactatcaatcaaatcgatgatttcttttaaataacgctctttgattaataatgaagtgctctcaatatcatcatatagactagtaatagaatccattgaagaaattggtttctttaaattcgcaatttctttattttgctgttttaatgcaaacttaaattcagcaaaaccactaaaattaagcttcttacaaaaacgaagaatcgtagcagaagaaaaggcaacagctttagctaattcttgaatactcatgtcaataacctcatcaggatgatcataaacataatgaagaatatataattcactttgacttagatttttaattatttcatcatctagttgatttattaacataagtttcctcttttctttcatatagtaaaataattatacaataaaggagtaaaaaaatgggattatttaaaaaaaaagataaatatttaaaagccttcaccagtggtaagatcattccaattacagaagtaccagatgaagtatttgcacaaaaaatgatgggcgatggaattgcaatctaccctgataataatataatcgttgcaccatgtgatggtaaaatcacagctattatggaaaatacagaacatgcagttggaatcacattagcaaacggtgtagaattattaattcatgttggtctagatactgttaatctaacagaaaagattttttcagtaaaagtagctaaagaaagctatgtacatacaggtgaagaattaattacttttgataaagtaagactaaaagaattagggtatcaagatattacaatgttagtaattttagatacgggtaatactaagaaactagaaatactatcagaaacggaggcaattataaatcaaacaaatatcattaaatatatagattaaatattttattgaaaacaataaaaaataataataaatatagataatatccaagggtaatgatatactatgtactagcgaatcctgttggattttatcgaaaataaaatgaaacaactgaaatgaaaaaataatatttgaagagggagatcatgctaactgcattaatttatagcatagctctcttttttatgttatcaagatataaaattaggttgtgataaaaaaagttagaccaatctttagataaatttaattttgtagataaaatcagtgtatattgaagttgataagtaaagaaagatatacaagtttgcaggattttgttatagttagccagtgataggagtagtttaaatggagataaatattgcaatttgtgatgatgacaaaaattacataaacgaaataattcagtatttaaataattgtagttggaaaagaaataatagttttgtatatcatactttttattgtggagaggcattattagaaagtaagcaatattttgattttataattttagatattgaaatggataaagtttcaggtatagaggtaaaagaaatattttataatcgaaataatcaatcaagaattatttttctaaccaactatgaggaatatatgagtgattcatttgggaagaatgtctatggatatatcagtaaagatgttcttcataagatggatatcccgcttaataaaatatttaaagaacttttagaacatcgcttaattaaaataagcgaagatataattgatttatatgaagtatattatgtaaaagccgatggaccatatattaatattcatacaaatggcagttatgaagtttatcgcatgacacttaaagattttgctaataaaatacataattcaaattttattagaattcataaatcttatttaataaatatgaggtatattaacgaaataaataataagtttttaattttggataatgatgaaagattaccgatatcaaagagtaaccgtaaaacagtattaattacttatagaaaatatttattggagaatataatttatgactagctggataattttattaattaaacagtatattgatattataaattatttggttattggtaattcaatatttaaaataaaatatgaaaaacataaaaaaataagagagataaaaattttatctttagtaatctttttaatttatgtagtactctgtaatcaaataaaagaaatttggattgatttaaatgcgcttatttgtttaattacagtatcaattatttttagatgtggttttttaaaaactgtaaaaattgtagttgtaagtattttaattacaaccttattggaacagtttataggttcttttatttcgtatgatttaaataatatatgcagttttaattttatattttcaaatagtgtaagatttgtatttataatgtttacagctcaaataataaattttatatttaataaaacaaatcttttgacagatttaccaggatatatatacgtaaacatgatttttggatttagtgccacaatgtttccattatttgtggttcaaacatataaattggcaataaaatctagattagtaattgttactacagctattgcctatattaatattgtaatttctttaatatccatttttatgtttattagaaacagaaacgagaaaaatcaatattatttagatagtataatgaaagataaaacattgaaattacaagaagattattataaaaaaattattgataattattctaatattcgtaagtttaaacatgatattaaaggtcatttggcagttgtaaatgaattaataaattctaaaaattatgatgaagcaaatgtttatataggaaatatgtcggaagcaataactggtaaagatatttataacactaataatatctatatctctagtattttaaattcttttgatcaatcatttattgataataagattgagtttgatctgtcttattatattattagtgatttaaagatgaatagtatggacatttgctcattattttataatttaattttaaatgcagtagaagcaaatttaaaaatagaagataagcgttttattaaattgtatattgcaaatataaaaaataatgtactaattaagattgtaaatccggttgatgaaaattttaatttagatattattaaagaaaataaaactacaaaagaagataaagaaaatcatggctttggattaattaccattaataatattatttctaaatataatggaaatattgattatagtatacatgaccaatatttaattgcagatattacaatattgaatgtactttaaaaaagttttgttcattaaatacaaaaatcattattaaaatacagtaaacgctaaaaaacatattttatcgttattatttcctcaaaaggaggaagtagttgtggtagtatatggaatattagaatggtttgaaacattttttggcggtcgtaaataattaattaaacgataacgtctcttgtggggagggaagtttatcaaatattgtcagggcactttgacagacacataatataataaaaactacgggttatatttccgtagttttttcttatttactatcaactattttcctttatattcaataaaatgacctttatagtggttttttgcttcatacagagctttatcagatttcttcattaattcttcgatagtattatttggaccactgctacatacaaagcctccagatacttttattgattgatatgaatgatcaggaagttcaattaattcttctttaaaataagaccataatttatttaattgatttattatagtatttttatcttgataattataaataaagagacaaaattcatcaccagatcgtcgtgcgattaaacaatttgatttagaaagcttatttaatgcgtaggtcaaacgtttcaaataatgatcaccaaaatcatgaccataagtatcatttatatgtttaaatgaatctaaatcaaccattacagctgcatataaatgattataattattgttattaatgactaaagttacttctcttttgaatgatgggtatagtaatagtccagttaaatgatcatgatctttttcgtactgaatttgttttttctttaaaatatcagaagaaacatcattaacagttccatagaaaccattttcatctttcacaagtcggatttttataaaagtatctttttcaagacaataaacatcactctcaccttcaattggattgctaataattatttgtagtttttttaatagttgttttggatcaagatacatttgatttgcttcttcatcacttaaatggagcagttctttcaatcttgcagtggcaaaaagttgtttcgtatcattttgatattcaaatgctgctagtgggatatcgataatggagataatttttgatattcgatcagcggagttgacaacactattaaccatactgttgattccagagcttaaatctatcaattcttgattatcatcagcttttacgacagtatttaaatcgccattttttattctatttaaatcattgaggacactatgaattccttttaatacttttttgtttaatataacattgattgacacaacgataacgatttcgattgcaattaaataagcaccaattaataataaatcacttgaacgatttttatataaaatatcttttggaacagttgctccaattaaaatattatcatattctctagttacaaaaaaattttcagttttgtttccaatatctttaaaagtaccagattgacaatcttttaaattatcataagtatagtaacttgcttctttgtcgtctaaatcattagtgctggcaatcaattcgttggttgttttattgattgcaaaaagctgctcaccttcatttgtgggaaatctagaaaatatataggaatatgtattcctttgttgtgcttctaaaagtcgtgttggttcaagaccgacttgtactaatccttttttgtctttacgagccactccaacatatttcataattttaccttcagcagtattaggctgagcatcttgaataacatattcatcagggtcatcgctttctaaaattggtaaaaaaccacgcatttgttcaccattatgaaaatccaaaccaacatatttaggaactgatgagtaagcaattaaaccctcactatcacttacatgtaattcatctacatcaagtagtgtagctaaattttgaagttcagtgacactttcaatgatattaggatttttttcaataacataagcaaatgcttttgctctagttaaataatcttcatcaagactagatttcaaatcagctagatctccagaacaacattctaaagttcgggcttgtaaagaatcagttgataagaaaaaatttattaaaagaacagaggctaatgaaatagacatgattatgataatgtatttcctaaatatcttctgcatttagccaccctcttccaatttgtaatgtatatatattattatagcattgttactatgtcttgataataaaaaaggatacagattattttgtatcccgttcgcaaccaaaaataatatttgcactttggcgtgctttagtcaaaacatccatgacgattcgtgaatgttcaagcattttattacatgtagtaaagtcattattatcaatacattccgcaaaaactttaaattcgctatacattcgatgatagttaccagttggtagaatctcactatctcggccatttcttaaaatttgcacatcagttagaacactggtaggaccatcaatttttacacaaccttggtcaccttgaattgtagaaatgattggagcaccacaatctttagcaccaatacagattgctttaaatgttggatattccaagatagcaactcctgaagtatcaattcctttttcaatattagcaaaatattctactttattaggggcaccaaataaaccaacaacaaaatgaatattatatacatttaagtccattaaagccccaccagatttattgacatcaaatgctggtaatatttcaccacgtttaaaagcgttataacgtgaagaatattgggaataattagatgaaataatactgattttcccaatctcagatattttttcttttatttctttaaaagttggaagatactggtttgtaattgcttcaaataaaagacaattttgttgtttagctaaagcaattaattcatctaattcattgacatttgaagtaaatggtttttcacaaataacatgtttattatgcaataaggctttttttgtatattcgtaatggagatgatttggtaaagctacataaatagtatctatttcatcatcatttaacaattcatcataatcatagtatgctttttttatatgatgtttatttataagtgtttcaattttttcttgagattcttttctccctaatattgccgttagttctatttcatcaataatatcaatgaatgttaataaatcgtagacgatcattccgctaccgataattccaagtttcatgttgaattcctccctgcttaccaccattatagcattgattaggtatattaattaataataatttatgataaaatacaaaagataaaggaaggtgatattttgaacgaagatattattgttgcaattgcaacaagtcgcttagaagctgcaatttcaatgattagagtaagtggtccagattgtattgcctttgttcaaaaattctttacaggcaaaataatagaaaaacctagtcatacgatcaattatggatatatcattgacgatggaaaaagaattgatgaagtgttagttaatatttatcgaggtacaagaacatttacaggtgaagaaatggtggaaataaattgtcatggtggtgtttatattacttcacgagtattagaagtgtgtatcaaaaatggtgctagaatggctgagcgtggtgagtttagtaaaagagcatttcttaatggtcgaattgatttatcacaggctgaggcaattagtgatattattactgctaaaaatagttatgcaacagatttagcgttaaaaggaattagtggtagtattagcggttttattgaagatttgaaagaagatttaattcaaataatcactcagatcgaagttaatattgattatcctgaatatgatgatgttgaggaattgactgcttcttcgttattaccacgaagtgccaatctattgactaaaatgaataagattcttgatgattctaaaaatattaaattagttaaagagggaattaaaacagttattattggacgtcctaatgttggtaagagtagtttattgaatgctctgcttcgagaggataaagcaattgtaacaaatattgcaggaacaacccgggatattgttgaagggagtattagcattgatggagtagttctcaatatgattgatactgcaggaatccgagaaactgatgatatcattgaaagtatgggggttgaaaagtctaaagaactgattcaccaagcggaccttgttttattggtaattgatggttcgcagtcattaagtagtgaagatatgcagttattagaactaacagaagatgctactagaattatcgtgcttaataaagccgatcaaggaacaaaagtagatttagatggtattgttattagtgctaaagataatcaaattagcactttgacagaagaaatcaaaaaaatgtttgagttaggtaagattattgataataatgatcatattttgacaaatgcacgtcaaacaatgttattacaacgtgctagtcaggctttaaagcaagctgttgaagctatggaaatgatggtaccaacggatttgattgttactgatttatatgaatgttggaataatttaaaagaaatattaggagagaaagcgaaagaagatttattagatgaattatttaaacgcttttgtataggtaaataaaatggacaaaaatagaattttatcggctagatttctaggcttttcaaagtatttagggattgtggcagctatatcgtttgtagtatttctaataattaatgcttttaatacaggtaatgatatattattttggattagctatgttttattgatgttatcaataattggagctattcaatgtatctgtctatattttattggtaaatattatggttcaaaatctaagtaggtggttaaatggataaaacttatgaacgaataaatagtttatttgaacatggattaattgatagcggaataagtattttgatatcagttgttatagttttggttattaataaaataatcaataaaattataaaaaagaagataaatgatccgttgaaattagtttttccaatgcgtattaaaaaaatcgttttagtaacaattgttttagcaattattatgagtgaaattacggcgatgcagtcaatcattaaggctctgctggccagtgggggaatcttagcagttgtagttgggttagcatcacaagaagctgcaagtaatatgatcaatggttttatgatcatgacttataagccttataaaattggtgattttgtcaatgttagagaatataatgttattggaactgtaattgatatttcaatgcgccacagtgtcattgaaacattagaaagaacacaggtaattatacctaatacgataatgaataaagcaattattgaaaatgtatctaatgttaagactcaaaaagccaactatttatatcttgaggtttcttacgaaagtgatattcaaaaagcaattgaaattattcaagaagaaggaagtaaacattcattatgtttagatggcagaactaaagcacaaaagaaaaaacatgaaccaatggttaaagttcattgtgtcgaatttaatgatagtggaattcaattacgagcaacattattatctaaggatagtggtgctggttttcaattattatcagatttgcgtttgattattaagaaacgttttgatgaaaacgggattgatattccatatccgcatcgagttgtaattaatgaaactagagaaaaaaatgatgaacaaacaaaataggtggttagatttagctcaagagttacaatttttagctcaaggtggattagcatatacaaaagataaatttgatcaagaaagatttgagcgaattcgtcaaatatctgcagaaatggtcgctttacaaagtgatttaccgattgcaacagttacttcattattttgtaatgaaacagggtttcaaacaccaaaattagattctcgtggtgctgtttttaaaggtgataagattttgctggtgcaggaatctgatggacgctggtcaattcccggtggttgggtagatgctttagcaagtgttaaagaaaatacaattagggaattacaagaagaagccgggattgaggctcagatagttaaagtaattgcaattctagatcgtaatattcataatacgcctcgctatgcgtatggaattactaagattttcatagaatgttcttatcttggtggtgcatttaaaccaaatattgaaacacttgatagtggttattttagcctagatgaacttcctgaattagctgaggagaaagtaactttagaacagataaaaatgtgcttcaaagcacattttgatgataattggcaatgtttatgcgattaatagacaattactgggttgatttattcaacccttttattttattgattatttgataaaatatagatacgatcaaatagttaaaggaggtctacgaaatatgattatagaacacttattagatgataataaccttaccaatactgaaaaaagtattgctcaatttcttttaaacaaagatcaaaaaattaataatcttacaagcagtgagttgggaaaacagagttatacttcacaagcggcagtaacccgtctttataagaaattagggttcaataattttcgtgaatttttatctacattgatcttagaaagaaatgattatcttaaatataatgatctcccaactgagcatcctgaacagtattttacatctttagaagatactgaaaaagtaattgcctctttatatgaaaaagcgatgattcagacaaatcgattactagataaaaatgttgttaatcgtgtttgtaatcggatattgagtgcttcgtttatcgatatttatggaattggtctttcagatacgattgctaaagaaatgtgttttaaattacaatcattagggcttccttgttcatatcaaaatggtattaatattaaatatattgataatatgcagcagcatcaaagtaacgtctcgatccttatcactacgaccggcgataataacttaattaaagaaattgctaaaatcttaaaaaataggaatgtatatacggtcgggatattaggtaaaaagggtaaggatctaattcagctgtgccacgattatctattatttgatactagtttatttgaagatattgatagcttatgtgctacttttagtgctgaatacgtaatcaatattttatatgcaacattgctctatcgtcttgaattatctaattatatgcactatttaaaatagctgtcagttgattatttttctaatgcgtttaaagcttgattaagaaccttttcaccatccatcataccgtaaatacgcatatcaataagctcaactggaacagtattgtttacttcttttttaatattattaagtaaatatctgatttgtggaccaacaagaattacatcagcaggttcttgggcaaattcatttggtaattctttttcacttgttgaccagattttgcaatcaatttcttttgttttagcaacttctcgcatccggtttactaataaacttgtagacattcctgcacaacatactaataaaatctttttcataattttctccttaatttttatttaatttaggtacaaataattgtttgacctaggaaaatatattcttgaatatcgtcaattttaattaaccgaggaatatattcttgtggtaatactgtttttaactcattttctaaatcttcaatattaggtaaaagactacaaaagataacgattgcctcaggcccaattacactaataatcgataaagaaatatatttaacaattttaataatatcttctggtgttttatatacattagcacctttctctaatagatttacggggaggtatttcatttcacctgccacgttatgcttgccattgattaatttattatcaatgatgataccagcaccagctttagtactcattggctgaaaaagtaacacaattgatgagtattgattttgagtagcatgatagccaattgctgcggtattaacatcgtttgtaataataaatttttgtgaatatttgcttgtaaacaattttttataattcatatcatcaaaaccattaatactggcagttgtagcaaatccattattaacaattcctggtgttgaaaaaccaataacctcaatacctggataatttaataaaacagtatcgataacatcatagatgtcttgaattgtaattcgttgtttaattgtttcattgtttacaataatatcactttgactttgataaagtcgatatgcaatatgaatccgattacgatttctaaaaagagaaatacatagaattttacgatgaaaggtgatggttttatttctaatcgaaagcaattgaacttgaccatttttgttacgttttttaattagttcttggtcaactagattaagaatttcttttacatcatatttagcaaatacttgtgcaggaatattaagtaaatatttatctttaaaaatctttttaacttttgcatacataaaagaaacttgaggtgctagtaggattacatcatattgttcaccttttttgaataattcgttgtagccagttgctgcaatttcataatcaagagcaaataactgaattgcttcatcaatcttataagcaaaataagttgttgtaagaccaccactgcagcataataagatttttatttttggtttcttgatcaatgtttttaaacattcaaccatttcataaaatagattaattgcataatttatgttattcatttgaaagtgtaaaaagaaacaagattcttgatctattttactaataacatttaattcaataatattgaatttataaaaaataacattagctacaccatactttgtctccaagataattttattttgatcttttgatgaaagcataatttgacaattatcgatctgttgaaataaaatccactttttatatatcgatgtatatacatcttttaggaaatcttccattttcacctcccctttcagtaataactgataactaattaaataataatcaaaattattggctaataaaatgaagattagtgttttaggctagtttatttaaaagttacaacttgataaataaaaaagtgattaatctagtcgctttagttgaaatatttttaaaatttgattgactataaggtaatcttatagtttaagatggagaaagactggaggaatgaggatgaaaaattatatttttaaagatttcttaaaatatacatcgttaaatgttttaggaatgattggtttatcatgctatattctggcagatactttttttattgcaaatggtgttggtgaaattggattatcagctctaaatttagctttaccaatgtactgtttaataaatggcttaggactaatgattggaatcggtgggggaacacggtattctttgttaaaggtaaatagtaatagaacctcacaaaatataattttcagtaatgctctttattttatgcttattctagccattatttttgttgttttgggactaagtgcgtcgacatcattagcaaatcttttaggggctaatcaagatacaactatctatactgcaacttatttaaaaacaattatgttttttgcaccaatgtttatgttgaataatttattgattggctttgttcgtaatgatgataatccgagattagcaatgatgggaatgttaattggtagtttaactaatgttgttttggattatatatttattttcccttttggtttaggaatgtttggggctgctttagcaacaggggtagcaccggttatttcaatttcaattatgtctccatatgtaatcaagaaagctaattttaaatttcttaaaacaaaattatgtcttaaccattgtaaagatatttttttattaggattatcagctttaataggagaattagctactggaatagtaatgttgttatttaattttactttgttgaagtatagcgggaatataggtgttgcagcctacggaattattgctaatatcgcttttgttattgtatcgatgtttacaggggttgctcagggaattcaaccaattattagtaaaaatcttagttttaaagaatatcgaaatgtaaatttagcttatcattatggtctttggacagttattatatttgcagttattgtttatcttagcagttattttgctgctgctcagatcgtagctttgtttaattcaagtagcaatccggaattgctggatttggcagttagaggaattcatatttattttgggggctttatttttgcaggagtaaatatgattagtgccactttctttagtgcaagcgataaaccacgtcaagcttttataatttcatcattacgaggttttattttaattgcaccagtaatatttattttatcaactatttttaaagtagatggagtttggctaacttatgtggtaacagaattgattacttctataattactattattttaaaaagaaaatccgattttagtcttcactagaatcggattctttttcttctgattttttaattgttaatttgatttttgttacacgattaccttttacaccagtaattttaaatgtaagattttcataagttacactacgttcttgattatcatcaggaatttctcctaataaatgaagaacaaaaccactgattgtatcatgattaacattatctaattttaaatctaattcatcatcaagatcgtcaattagataatttccatcaacgataaaattatagtcatctattttttgtagtttaggttcatcgtcatgatcatactcatcttcgatatctcccatgatttcttcgattagatcttcaactgtgacgatccctgaaaacccaccatattcatctacaagaattgcaatatgttggcgatcttcttgtagttctttaaataaatcatcaatatttttagtctctaagacaaagtatggttttcgtaatagcttacgaatatcaacattgtcaaaaccaacttgtctagcttcaatagcaaaatccttcatatttaaaatcccaatgatattatcaattgaatcatcataaacaggaattcgagtatactgcattgacatcatttgatcaatgttctcacttaatgggtcattaatatcaatacaataaacatcagttcttggggtcatgacgtttaaagctaaactatcatcaaattcaaaaatattggtaatcatgtcagtttcaatttcattgaaaactcctgtctcttgtccactttcaaccattgaacgaatttcttcccgtgacaaagattcttcaacattttcatcatccattccaaataatcttaagacaaacttagttgaccaagataaaattttaataaatggtccagcaattttactgatgatcaaaataggcttagcacagaacattgaataccattccgctttttgtaaagcgattctttttggaactaattccccaaagattaaagtaataaaagaaattaaaatagtaatcaagacaactgcgattgtatcagcgtaaggaattgaccaaacttttaaaagattagctaaactaacagaaatacccgtagcagcactagctgagttaaagaaacctgctaaagtaatcgctacttggatcgttgataagaagttagttggctgatctaatagtttttctactaacttagctttcttatttccttcctcgcttaaacgacgaatcttgtttttgtttaccgaaacaattgccatttcgctagccgcaaaatatgcattgattaaggtaagaacaacgattaaaattaattgcaatgtgattgaagactcggggcctgcatccataaattaaaacactccttttttatgtaattaaattttatgagaattattctatcaaattcatgattgaatgtaaatatttatagccaatgaagattgttaagatttgattaaatgtcctgccaatattatactgagtatataaaataatgcaggtaatttaatataaagaggtaatttaatgaagaatttcgattataagggaagttatattaataaaacagatcatcatatttatattgctcctagtgaagaattaaaagatattattgctcattatacaattacttttcctagtgaagttcccgcctcatcaaaattatttcatattattcctgatgctagtggctgttttatttttcagggacgctctcgaagagatttttggggtccaatgagtgaaatcgtggttttagaaaatgatttgcaaaaagccccagctcgtttctttgtagaatttagaccaggagggttgtatcaaattagtggtttacatcaaaaaaaacttgtaaatcagcgtcagcaattgagatatttagatgtgcagcttgatgaagagttagcattactttatcaatcatgtaaagattatgaacagttgatcaaagcttttaataaatattttacgggaaaaagaaaagttaatttattaccagctcgtttgattagagctaaagaaattattgatcaggatcacggaaatgttagtttagaaaaggtagctagtgattgtcacctttcttcacgacaattattacgtgattttcataattacataggcttgagtggtaaggaatatgctaaggtagtaagatttaattatttattaaagcaaatagaagaagatgattttttatctttagcattgcaagggggctattttgatcaggctcattttaacaaagtgtttaagcagattacaaaaacaactcctaagaaatatttatcgaacttggcggatttttacaatgaaatatataagttctaagttataatttgcttaggatggtgatgaaaatgattgaatcgagatgtggaattatatgtagtgaatgtgaagattttctatgcaaattggctaaatcgtatgcttatgacgaaaaacaaggggatcagggaaaacgtttagaacaatgcagatgttggggtaaaatcaaatgaaattagaagcaactgtcttagcagtcaaaaatctcgaagtttctaaacagttctatatgcaattgttcgatcaaaaaataattttagatcatggtttaaatattacttttgatggtggttttgctttacaaaaagattttgcctggctcgttgatgtccctagtgattgggtttgtgataaagcttgtaatatggaattatattttgaagttgatgattttgataaatttataaaaaagttggagacatatccaaatattaaatatgttcacccaatcaaaaaatataattggcaacagcgggtagtacgaatctttgatcccgataatcatatgattgaaattggtgaagcaatggatgtagtaattacaaatctattattggctaaaaaagatatagatgaagtaagtagaattacacaatatcctattgactatgtaaggaatattttcaataagttgtaggttgactacaactttttttatagatcaaggattctagtgaggtaaacagtccgtcgatagtaaaattataacttttatgttaggattaggacgtagaagggaagtaattttatggataataaagaaattgggatacgaattttatcagctcgtaaaaatcttgggtatactcaaaaacaattaggaaatttaatcaatgtaagtgataaagctgtatcaaaatgggaacgtggaatcgggtgtcccgatatctcattattattaccgttaagtgaggctttaaagatgagtattgatgaattgattggtggtactgtagttgataaaagtgagaaaaagacagttcaaaatctaatcaattatacaaagataaaagcaattgaaaacaaggagagaatcattaagatcagttatctttttatcacaatcgtaatgatgattggaatctttgtaccatgtttatgtaattattacctaaatcatagtttcacgtggtcaataataagtagtgcagcaattatttatgcttggataattttaacggttttagttcaagctaaagaaaatgttgttattaaagctattattgtagccagtataggggtaattccactgctttatgtagtttcagttcaggtgtattcattagactggtttttacatgaagctttggttattgctttgtttactaatttgtatgtatatatagtcatatggatatgggtaaaaacaacgctgaatatttggtataagattggtttatgtatctatttatcaaatattactaatattcctgccaactacatatctggtgtcaatttattttcgatgattatgaatttagctttaaatatgattgtcggaacaattattattatggttggctatacgagaaagcataattaagatgtttataaatcaaaaattgaaaaaaattatcaaaaacaataaaaaacttgattcaattaatttatttgaataaagaaggacccctgtaaaagaccaaagtatcaataattattaggaaaatattgatcatgattagtactctaataatgatacttaatagaacaattggttttagtcttgctattaggggaataattcaaatttttgtagcaatgatgctatgaaaacaaaggtagactatttctaactggaaatagttttttatttacaaaatcttattttaaaatttacaaaatagaaatagttagaaattgacggctatgataaatttacttagtacactacgtacaaatatgtaattaggggaaaagtatatgaaaaaagtaaataatcgaattattaaaggggtcctgtgtttagtaacattatcgacaatgttgattggtcaaaataacattttgactaaaggttatgcccaagatacttatagtgaggttgcaggtgaaagccatactggttcatttagtgtggatagtttaacacttcagccaggggcaacaacgacatcaatcaatctaaattggtatgcaccagcaggaacgacggtagcaaaaattcagtttggtgatcaaacttatgatgtaacagccaaaccattgacttcaccaaccgaaataaaaagtgataaatatactgatactggaaaattagtatgtaaaacgacaatcagtaatttaaaaccagatactaagtatacttattatatttcaaatgatgggggaacaacttggtcaaaggaatataattatacaactccatcaagcaacgaatttacttttggttttacaagcgatccacaaataaaggaaaacaaggaaattaattctgaaggttggaacccaagtgatgaaacaaatcaaaccggttgggcaactatgatggaaactttagaaaaacaaggtgttgacttagtggtgtcagcaggggatcaagttgaagatcaaaactggggaaaatcaagcgagtatgaggctttttttgcaccagaagaaatgacatcaattccatatgctccagctgttggaaatcatgatagacactatatgttcgcagatcattttaatttaccaaatcaaatggaatcattaactgaagttaaaacaacgtttagaggacaaaatagtggaactagtcaaagtcacggaaattatattcaggcaactgaaaatgaaattaaaaataatgcagcttctaatggggtgacaccaaatagtgatggtcaatatgattttagtgaacgccgtgatatggaaactcaaggaaattattactatttatataataatgttttatttgtcactttaaatactagtgcttaccctgggggaaatgacgaagaaaatgcaaacaatcctaatgtttcaagtgcctctagagataattcagaggcagaagcaatcgtcaataattttgctcaaacattaaagagtgcaactagtgaataccaaaatcaatatcaatggattatagtcactcatcataaatctactcaaacagttgctaaacatgcagcagatagtgatattgaaaactatgttgatgcaggatttgaaaaacttatggatgagtataatgtggattttgtcttaggcggacatgatcatgtttattcacgtagctatgttttaaaagatgggcaaagaaatagtgaaagattagatacacttaataatcctcaaggaacaatttatattacggggaactgttgttcagatatgcaatattatacaccgtttgaaacattagataaaaataataatgctgattatccaatcttagctaatggtaaaagtggctctgcggcttacctagaaggagattcattaccagttggaaatcaagaatggaatcaagagtatagtcctagttatgcagtatttaatgttgaaaataatcgaatatcggtaaaggtttataatcttgctggtgatcaaactaatcctgatagtaaagaaatcgatgcgtttactgttactaaaaatagtgacggtggtgaaaaaacaactggttatgaaaacaattcagcattattagcgctagaacagtcagctcgttatgattcaggaacaactaacagtgatgggggagtaactgaaatagttgattataacacagtgacaggatgggcttatgctgttaatggacaatctggaaatttaacagcaattgccctaaaaaatatcgaaaataaggataaaatagacttattggacggtaatgacattgatattagttcgttagtacaaagtgctgattttacatatggtgatatgacatcagtagcagttagtcatgatggaacctcattggctgttgcgattcaaggtaaggagactaatgctaatggtagagtagctttatttgattgtaatcaagatggaacaataactttaaagcaattgttcgaagtaggtgttcaaccagatatggttgtctttactaatgatgatggacaaattttaacagctaacgaaggagaacctcgggacgggtatactggagcagttgatccaaaaggtagtataagcgttattaataccaaaacaaacaaagcaaaaactgttgacttcacagcttttgatagtcaacgagatgcattaatagaaaaaggaattgttttgaaaaaaggcgttttgccatcaacagatttagaaccagaatatattgcagttagtgattctaaagcatatattacattacaagaagctaatgcgattgctaaattagatttaaatagtcttgaaatagaagatatttattcagtaggatttgaagattatagtaaaattgcaattgatattgataaaaaagatgaaaaatataatgcacaaacatatgattctttaaaaggaattcggatgcctgatgctatttctgtttacacggttgatggaatcgattatttaataactgctaatgaaggagatagtcgtgactggaatggttattcaaatgaaatagaggtaaattttggtaaaggaaaaacttcaccaactggtaaaataacggctgataacagtggtttaactggtaaggtcacgttcttcgatactagtgattatgatggtcttaataatgaaaatgattatttatttgggggaagatcatcaacaatttttaaagctgatgagcagtcattacaagaaatttatacaacaggaaatgattttgaagtcaaaactgcagcatatttgccaaataattttaactgttctaatgatgatgctacaatagatgatcgttctggtaaaaaaggtcctgaagcagaagctgtgacaattggtcaaatcgaagataaaacatttgcttttattggattagagagaattggcggtataatggtttatgacattacgaatccagaaaaaacagaatttgttaattatattaattctcgtgattttagcacagatattggtggtgatgattcacctgaaggaattcattttattgcaggtaatgatagtattacagggaaaccacaattagttgttgcttatgaagtatctgggacagtgggagtttacgatctgactttgcaaaaaaatagtgatcaatcaggcgatgataaaactgataatccatcacaagaaccaacggttgaagaaacaaataatagttctaacacaaatacaaataacaaaaatcattctgtaaatacgggtgatgccagcaacattgcgattacaataatttctttaattagtacaattgttctaataacgattttaatgaaaaaggataaagttttagcagaggattaatctataataaaattaatattataaaaaagaattggttttgaaatccaattcttttttgtcgttgtaaaaagccactgagaaaataaaggagttggctacatatttaaataaatcatcaataatactttattctactaaaaaagcatatgttcattaataaatgttaattagaaagaatttaatttgttctttatttatgtctttttaatattttaaaacaactctttaatcctatattaattattagcatgctagacttttaatagctagaggaggataaaataatggtttaacttatttcaatatttaatattaaaaagaaaggaataaacgataaaatgaagaaaatattagcttttttattaatagctttattaattagtggctgtgagagtaatagtgggaataagagtattgatgaaggtgatgtatttgtagttggaatggaatgtaattatccaccgtttaactggcagacaaatacacaaagtgataccgcagttgaattagaaggcagtggttacgctgatggctatgatgtttatatcgcaaaggaaatagcagaaagtcttgataaaaaactggttataaaaaaattagcatggaatggtttgcaacctgcacttgaatcaggcgaaatagatgccattattgcaggaatgacagctgatgaagagcgtgaaaaaggaatagattttacaacaccatattatcaatctgaaatggttatgatcgtacggggtgatgatgctagtaaaaattatactgatattcaacaattttctggtaaaacgatcgtaggacagatgtcaacaagttatgatacagtaattgatcaaattaatggagttgatcatgctacacctaaacaatcttatcctgaaatgctggttgctttacaaagtggtgaagtcgatggaattactgcggaattacctgtggcccaaggaattttagaaacaaatcaagatctagcgattgttagatttgaacaaaataaagggtttaaagtagataccgcagtttcaataggtttaaaagagggtagtcgaaacagtactttatttaaaaaagtacaaaaatgcattgataatatttcatcagaaaaaagaaatgaaatgatgggtaaatatagtagtagtcagcctaaaggagaataatcatgtttgattttgataaatcatttacgatttttttagataactttgatttattttggtatggaacgaaaataacaattattttggcattagttggaacaatagcgggtttaataattggactgctatttggagcgattcgtgcaacaacgatagatattaaagataaaaagattattgtactaataaaaaaagcattaaaaataatttcagaaatttatatttggttttttagaggaactccaatgctggttcaagctatgtttttttatcatggattgcgacctttttttcaatggaatgcacttactgccggaattatgatcatttctattaatactggagcatacatggcagaaatagttcgttcaggaattcaatctgttgatcgtgggcaaagtgaaggagcgttatcattaggaatgacaagggttcaaactatgaagtatattatattaccgcaagcaattagaaattcatttcccgcaattgggaatcaattcattattaatattaaagatagttcaatgctaaatgtgattggggttgtagaattatttttccaatctagcagtattgctggatcaacaatgtcatattcagcgaccttcttaataacatgcctggtttatttgtgcttaacctcaattgcgacaattttattaaatataattgaaaaaagaataaataatccaatattaagataaagtgaggaaattatttatgagtgataatattattactattaaacatttaaaaaaacattatcaagccctgccggtacttctagatattaatttagaggttaatcgaggcgatgtaattagtatcattggagcaagttgtagtggtaaatcaacttttttaagatgtcttaatttattagagattcctgatcatggtgagatattgtattgtaataaaaatattttaaaagaagaacttaatcttaataaatatcgtagtgatgttggaatgatttttcaaagctttaatttatttaataatcttacagttttagaaaattgtgttatagggcaaatgaaagtactaaatcgcaatcgtgaagaagctgaagaaaaagctttattatatctacaaaaagttggtatggctgagtttgcgaaaaagagcagtacacaactttctgggggccaaaaacagcgggttgcaattgcaagagctttatgtatggaaccacaggtacttttatttgatgaaccaacaagtgcactagatcctcagatggtaggagatatcttaaaaatcattaaacatttagcgttaaaaggtatgactatgattattgtgactcatgaaatgcagtttgcgcgtgatgtttcgaataaagttatatttatgcataatggaattattgaagaagcaggaacaccagagcaaatatttgagcatcctcgaagtatgggaatgattcaatttttatcacggcaatattagagaacttaattagttctctttttaatagatattaatactatcttaatatctttaatatttaacttaacgctacattaattttattcatgctaaactcatcgtgtaaaaggaggacacttatgaatgtaatcgtaggagtgattggggtaatcggtgttgcaatattaggttaccttacagtgatattaattaagggggataaacagtaatggatatttttgtcaaatatctaggatatctaatcgttcttgttgttttagcagtaccgttaggtttttacattaataaagtcatgaacggtaaaaaagtttttttatcaagaattttagaaccatgtgaaaatttcatttatcgagttttacatgtaaaaaaagatgaagagatgtcttggaagaagtatttagtaagtgtattaatatttagtggatttggattagtatttgtctttttattacaaatgctgcaaggagttttgccgggtaatcctgcaaaggttgaaggaacaacatgggaccttgcgttaaatacagcaataagttttgttactaacactaactggcaagcttatagtggtgaaagtggattaagttatttaacacaatcgttaggtttaacggttcaaaactttgtttctgcaggaacaggactagcagttttatatgcattgattagaggctttacaagaattaaggctaaaggcttaggaaatttttgggttgatttaacaagatctgtaatctatgtcttaatgccgctatcagttgtcttatcaattattttagtgagtcaaggtgtaactcaaagtattgatgagtatcaaactgttaaattggccgaaccaattgttttagaagatggtactgaaattacagaacagacagtacctttaggacctgcggccagtcagattgcaatcaagcaattaggtactaatggtggtggtttctatggcgttaactcagctcatccattggaaaatccaactggattaagtaatttagtagaagttgtatcaatattattgattcctgcggctctttgtttttcatttggcaagggaattaaagatagtcgtcaaggtattgctatctttgtcgcaatgggaattatgctggtagcagcacttggaagtattgctgttagtgagcagatggcaactccacaattagaacaaaatggaattgtcgatattagtaaccatgaccaagctggcggaaatatggaaggtaaagaatcgcgttttggaattgttggatcatcaacttgggccgcttttacaacagcagcatcaaatggttcagtcaattcaatgcatgatagttatacaccattaggcggaatggtaacaatgttattaatgcagttaggtgaagtaatttttggtggtgttggctgtggtttatatggaatgttaggatttgttattttagctgtatttatggctggattaatggttggacgaaccccagaatatttaggtaagaagattgagccttatgagatgaaatgggccgtagttgtttgtttagcaacacctgtagctattcttgtaggtagtgggattgcttccctagttcctcaagttgcggatagtttaaataacagcggtgcacacggtttttcagaattgttatatgcttattcttcagcaggtggtaataatggttcagcttttgctggttttgcagcaaatacaccatttattaacgtaacacttggattggttatgttatttgttagatttattccaattttaggtattttggctattgctggcagcatggtacaaaagaaaaaagtggctgttactgcgggtacattatcaacttgttcaccactatttgtctttttattagtattcgtagtgttattagttggagcactaagtttctttccggctttagctctaggaccaattgcagaattttttggaatgttttaatcgggggataaatatatgaaaacagaaacaaagagtgctttaatggataaacaaatggtcattcgtgctattaaagattctttttataaattagcgcctaagacgcaagcaaagaatcccgtaatgttattagtatatatttcagctattttaacgacggctttgtttgttatttcgttatttgggattaaagatgcaaattctggatttactctaggaatagcagtaattttatggtttacagtgctgtttgctaattttgcagaagcgattgctgaaggacgcggaaaagcgcaggcagattcattgcgagcagctaagaaagatgttgaagcttataagattccaagcattgatcaaaaagatatagttgaaattgtatcatcagcaacgctaacaaaaggtgatatcgtacttgttaaagcaggacaacaaattcctggtgatggtgaagttattgatggtgtagcttcagttgatgaaagtgcaataactggagagtcagcaccggttatccgtgaaagcggtggtgatcgaagtgcagtaaccggtgggactacagttttatcagattggatcgttgttcaaatttcaagtgaacctggagaaagtttcttagataagatgatttccatggttgaaggtgccaaccgaaaaaaaacaccaaacgaaatggccttacaaattttccttgtagccctttcaattatctttgttttagtaactatggcactttacgcgtattcagcttttggagctaaacaagcagggatggataatccttcttcggtgacagtattagtagctttactagtatgtttagcaccaacaacaatcggagcactgttatcagcaattgggatagctggaatgtctcgattaaatcaagctaatgtactcgccatgagtggtcgggcaattgaagcagccggtgatgttgataccttattacttgataaaacaggaacaatcacactgggtaatcgtcaagctagtgcatttattcccgtagatggggtaacgagcgaagagttggctgatgctgctcaattggcttcattagctgacgaaactcctgaaggacgtagtattgttgttcttgcaaaagaacaatttaatcttcggggacgaagtattaatcaaatgcatatggaatttgtaccattcagtgcaaaaacgagaatgagtggtgttaattatcaaggtaatgaaattcgtaaaggtgcagctgatacaattaaaaaatatgtaacagaaaacggacatatatatagtgatgagtgtgaaaaggtagttactgagattgctaatcttggaggaacaccattagttgtaactaaaaataaaaaggttttaggagtaattcatcttaaagatattattaaacaaggggttaaagaaaagtttgctgatcttcgtaaaatgggaattaaaacggttatgataaccggtgataatcctttaacagcagctgcaattgcagctgaagctggagttgatgattttttagctgaagctacgccagaaggcaaattagaaatgattcgagaacttcaagctaaaggtcacctcgttgcaatgactggtgatggaactaatgatgctccagctttggctcaagcagatgttgcagtagcaatgaatacaggtactcaggcagctaaagaagctggaaatatggttgacttagattcttcaccaactaaattgattgatattgttcgtattgggaaacaattattaatgacaagaggaagtttaacaactttttcaattgctaacgacgtagctaaatactttgcaattattcctgtactattcattactttatatccgggattagatgctttgaatattatgggattacacagtaaggatagtgcgattttctcagcaatcatctataatgcattaattattattgcgttgattccattagctttaaaaggagtaaaatatcgtgaagtgtcagctggtaagttattatcaagaaatttattagtatatggattaggtggaattattgctccctttatttgtattaaaattattgatgtaattattgttgctttgcatattgtatcgtaggaggagaagtttaatgaaacatcttaaaacaagcgttctacccgctttaaaaatatttctgatctttacagttgtttgtggagttatttatactgctgctattactggttttgctcaaattgtttttcctgacaaagcaaatggaagcattattgaagtagatggaaaaaaatatggtagtgaattattaggtcaacaatttatcgatgatactcatatgtggggtagaatcatgataattgatggtgaaactttcacaaataaagatggtgaaaagacaatgtatggtctagcatctaacagttctcctgctagtgaagattatgaaaaggttattgctgaaagggttgcaatgattgaggctgcaaatccggagcagaaaggtaaacaaatacctgttgatctagtaactgtatctggttctggacttgatccacatatttctctagcagctgcggaatatcagattccacgtttagtaagaacaacaggaaagagtgaagctgaaattagaaagattattgataaatatactgatcatggatttcttggttattttggagaaacaacagtaaatgtccttaaagtcaatttggctcttgatggcattttgaaataaaaataagtgtctgtcattatgataggcacttattttaacaaagcaatcttaatacttttttaatatcctaggcgctataataaaaataacagtaaaggaggaagtgtaatggatgaacgaagaccagatcccgaagaattgttaaaacagattaaacaagaagagattgctaaacagcgcggtaaattaaaaatattttttggctacgcagcgggtgttggaaagacttatgccatgttggaagcagctcatgttgcttatcatgccggtgtcgatgtagtagcaggctatgttgagccgcatcagcgtccggaaacatcaaaattattggacggattagaggtcttacctcctttaaaagttactcataacggaatcatgctcaatgagtttgatttggatggtgcattaaaacgaaatcccgatttaatattggttgatgaactggctcatacaaatgatgagcagtgtcggcatttaaaacgatatcaggatattaatgaattactagatcatggcatcgacgtttatacaacgataaatgttcaacatattgagagtttaaacgatattattgcttcaattactgcagttgtggtcaaagagcgaatccccgattatatttttgataatgccgatcaggtagaactagttgatatagagcctgaagatttaattaagcgtttagaggctgggaaaatatatcagaaaaatcaggttcaacgagcattaggaaacttttttatgcttgataacttgattgctttaagagagattgcactccgtcgtacagctgatcgtgttaataaaaaatttgagcaaattaaacctaaaaacggcgaacatcattataccaatgaacatattctaatttgtttatcaccagctccttcaaatcaaaaagttattagaacagccgctcgaatggctaatgctttctttggtgaatttacagcagtttttgtagagacgcctaattttgaaaaaatgccgactaaagttaaacaggcattaagagccaatactaaattggcttctcaattaggggctaatatagtaaatttgtatggtgataatgttcctgaacaaattagtgaatatgcaaggtttgctggagtatcaaaaatcgtattaggaagaactaatactaaacgacgtttttcgcacaatagttttgcagatcaattaatcgctttaacaccaacgatcgatatttatatcatcccagataaaattagaaacaattataagcatacgtctttaaaaccgcgacaatttttttctttatcaattaaagataccatcctttcaattgtaattattcttattgttacattattaggaatttggtttagagatttaggatttggtgaagctaatattattatggtgcatattctaggtgttttagcaacttcattattaacggaaaatctaatttatactcttttgtcgtctttagtaagtgtgctatcttttaatttcttttttactattccgatgcactcatttacagcatatgataaaggttatccaataacttttgtaatcatgtttttaacagcttttatcacaggtactctaactaaacgagtaaaagaacaagctcgtctatcagcaataaaagcttttcgaacagaagttctattaaaatcgagtcaaaaattgcaacgggctaaaacaaaaaaagaaataattgatgagatttctaaacaattatttaaacttctagataagacaattattttttatcctgttgaaaatcatgaactaagtgaaccactcgtatttaaaagtaatgaacaggaagatgaaaaaatttatttgaataaagatgaggaagcggtagcttcttgggtttttaataataataaacatgctggtgcttcaacaacgacgttacccggagcaaaatgtctatacttagctgttcgttgtgaagatagtgttttgggagtaattggaatctatttagataagacagcgatcgatgattttgaaaacaatttattaatggctattttaaatgaaggagcgatggctttagaaaaagaagcttcaaatagtaaaaaacgtgaagttgaaattaaagcgaatcaagaagaactacgtgcaaatttactacgctctatttctcatgatttgcgtacaccattgactagcatttctggcaatgcgggagttttattagatagtgcagataaactatctaatgaacgtaaaatagaaatatatagtgatatttacgaagactcaatgtggttgattgatttagtagagaatttactttcaataacaaggattgaaaatgggaatattcaaataaataaggaagcacaattaattaatgaaattgttttagaagcgatgcatcatattagtaaagatagtgcagatcacattattcaattggacttatcagatgagttcatttttgtaaaaatagatgcccgactgattatgcaggttattattaatattgtaaataatgcaataaaatatacaccgttaggttcaactataaaaattacaactaagaagcttaatcatgtattatcactagaaatcagtgatgatggagaaggcgttcctgatgatcaaaaagaaaaactttttgaaatgttttatactcgtaataacttaaacggagatagtcgtcgtgggttaggattgggtctggctttatgtaaatcaatcgttgaagctcatgacggaaaaattaaagtaatcgataattatccccgaggatcaatttttgtaattaatttgccattagaggaggtagatatacatggataaaccattaattttagtcgtagaagatgatcgtgctgtacgaagtttggtaacaacaacattagatacacatgattataaatatattacagcccaaaatggccaacaggcactgttggaaattgtttctcgtcgtcctaatattattttactagatcttggtttacccgatatggatggaattgagattattaaaaaagtgcggagctggtcaattgtgccaatcattgttattagtgctcggagcgaagataagagtaaaatagaagctttggatactggagctgatgattatttgacaaaaccttttagtatagatgagttattagcacggcttcgggcaacgatgcgaagattaaaatatcttgaacatcaagaaattgaagatgttgtttttactaatggggatttaaaagttaattttgattctggctgtgcctatttaaatgatcaagaattacacttaacccctatcgagtataagttgttgtgtttattagcaaaaaatattgataaagttttgactcataattatattttaaaagaagtatggggtgatgtaattcaaagtgatgtcccatctttacgagtttttatggcaactctacgaaagaaaatagaatcagatacaactaatcctaaatatattcaaactcatgtaggggttggttatcgaatgttgagagtagaaagagagaaagagtaaatcactttctcttgaatcattgagtagcaggctaggaggttaatatgaagaataaggataattatgttaacttaactaaaatcattgttatatggatattagcaacaatttcatcattaatattagattattttaaaataagggttgaaaacattcttttaatttatgttgttggagtactgataagtattattgaaacaagtaatattgcctggggaataatttcagcaataatttatattatgactttcaattatctttataccgatcctcgatatacttttttgattaatgatcctaattatttaatatctgtttttatttttattattgttgcaataattgtttctacattaacaaatcgactaaaaaaacagcgtgagattgctttgtatcaagaagaagtgacatctaaaataaatcaaattagtagtggctttttaaatctatcgggttatgaggaaataaggacttattgccaggacagtttatataatttaacgaaaataaaaaatgaagtatttctatatcaaaataaagagtttcaagatttaatggcatggtggtgttattgtcatggtgaaccatgtggaaaggatcaaaagaaattcacatatttaaaggaagtatatttaccaatcaaaaaggataattatacgtatggtacgatcaaatttgattgtaatcaaagaactattactgatgaagatcttatttatataaaaacaataattgcggagttgattttagtattacaaagagatcttttaagccatgaaaaagaagaagctagattacaagtggagcgagaaaaattaaaaagtactttattaagaagtatttctcatgatcttagaacaccattaactagtattgctggtggggctaattttttagtaaataatttggatacagttgagtctgatactagtctaaatattattcaagatattagtaaagaagcaatgcgtttaaatgggatggttgaaaacctattaaacatgacaaggattcaagaaggaaattttaaaataaataaaaaactagaagtagttgacgatattatatctacagcagtttcagcaattactaatcgtaaagaaaatcatgaattagttgttaaagaaaccaaagatattattttgtttccctgtgatgctcaattaattgttcaagtactcgttaatttattagataatgcttttaaacatactcctgacgctagtaaagtgatgttaaaagcatttgttcgaaataataatattatttttcaagtaattgataatggtaaaggaattgaaataaagcagctcaatcatatctttgacgatttctttacaaccagtctagataatggtgatcataaacgtggaattgggctaggtctagcaatatgcaaagcaattgttgaagcgcataagggtgaaatcaaggcctttaataacgatttaggtggggcaacatttgaattaagcctaccgttggaggaagagaacaatgaataatacaacaattctaattgttgaagatgacaaaacaattcaaaactttctaaaagtaactttaaaaactcaaaattataactatattattgccgaaactggactaagcggtttatcacttttctatgccaatcgaccagatttagttttacttgatttaggtttgccggatattgaaggaattgaggtgcttaaacaaatacgtcaaaattcaagtataccaattatcgtcgtttcagctcgttcatcagaaactgaaaaagttatggcacttgattatggtagtgatgactacgtgactaaaccttttaatgccgcagaactattagcacgaattagagcagcactacggcattgcttaaaagaaaaagttagcgaaccaatatttgaattagattatttgaaagttgattttgaacgacgacacgtatgggtcaaagatcaagaaattcatttaacaccaattgaatataagatgttagtcttattgattactaatcgtggaaaagtattaacccatcattttattcaagaaaatgtctggggatatgaaactacagatgattatcaatcattacgagtatttatggctaatattcgtcgtaaaattgaaattgatagttcctcaccacatttcattattactgaagttggggtaggatatcggtttgttgaataatattaatgtaatctttatatttagggctaagattataaatagaaaatttattcctttccatgctacgatatcagtgtagaaagggagtgattatatatgttgaaaacagcatatatttatcctcataataccccaagtattgtaaatagaggaaagattataaactatacaaaatattttattactgatgtattttgtgttttcaaattggctttattaatgctattgactggtgcattaatggttggcggattattccttgttgtaggaatgccatactttgttgtatcattatttatttaatcaatttagataaaaagacatagggtaaaaactctatgttttttaataagtatttggtaactatcagtgttattaacaaatttagatttatattttaatgtttttagaaatagttttaattcgtttaaaataactaaattatttttattaaatggaatcgtactagtaataggcaatccaaaagataatgtttgtcttgcaatggtgttatctgctaaactatgatcaattatgaaattaaatagctgttcaacaataataattatcatagtttttttcagtaattatgatagaagctagatataaaagaagattaatatttttatcaattaatttattaatatattgatctaagtaaaaattttttattttgttagacaagccttgttttgaagaaatgaggactactttatttgtattatctttgattattaaaatgatgattgccattaaaaatattcccgcaagcaaatggttttcttgatacaaatactggttctaattatcgcttggatttattaacagcattagctaattttttactgggttctcactttggtgatttattgaaaaattaatataattttaataactaaatagactaataattattgtaaaagcaagagtgataagtttagctctatagctaatatcgattcttttcatttcatgctccgatctttattgataagctccgattagtaaaagaatagtgatattggtgtcttttaataatctcaatacagtcattaagggtttttagatcatcatcaagataattaaaattattatttgaaaaagttattttatgatgatttaattcaataattagttcgtcgttttgattactatggcgcagagaaaaattatataaccttgtaaccaaatcaattatctgttcacgattacctttgataatcatcatttgtggtttataggataactttatctttttaaaattcaacacattagcactgttgtgtactaattgggtgattagttgtgaaatatctatttcttctatattttctggaatcgaatcaaaactcgaagctttagaatcaggagaaactggaatttgttttttttcagcaaagattattcctactccaagatagatcatccctaaaaggatgagcgctaataaatagttataatagtgtgttgctaaataatcaaaaaaggtatactcttcaaataaaccatcaaattgataccagactaaatagcctttttcattaaaatcattaattccatatagctcattaaagtcagtatgctggctatattttcctgataattcttgaatacaaatacttgatgtaattgtacttgttgtttctagaatctgcttttgattagaatcaatattttgataataaccgttttgatcaagattttgataattttttttaaaacatttttctaaattttcataagattgcagggtataattgtaagcatagtcgctatcatattcataaatagtaattaaagggcagtctagactgacaagctggcaagtaattgttgaagaatttgcttgccctaaaataacttgttcatcaaaggctaaatatgatagttttgaaacttcaataaaatcattgttgttttgatcataatttaatgtaacattaattgtttcaatattattttctgatacttgagaaagtagatattggcttaaaatttttaattgatcataatttagctgctttaatgagataactgattctttattattactatttatagtcattgaccaagtttcactggctggtaaatagggattaagctcttcatcataaacaatataggtatttgtaagaatacgctcgaattgtgcattaacggcatcttcaacatgatatgaagaaatttttaaatcatcattaatactatcggcaacaattttaacaggtgaatcgtctttatagatctgtttagccttttgataatcttggtatgtaaaaaagcttattatgatagcgatactaaaagttataagaatcattattttagcaagtttattaaagtggattcgtttcatcggttgctcctttaattatttgtttaaataataaattattgtggtcaaaagtatactcataattatgaattttaataatttctaaacagtcatttaatgcagttaagttttcagtagtataagtaaaattatcattagtgaaggatagtccgttttcgataaaaataatcgataaattatcattactagcactatatctaatcgcaaaattatataaagtagttataagttttgttatttgtttacgattccctttaataatagttgtctgaggctgatatgataaaatcaattttttaaattgtaataagtttgagctattatcaataagttcagtaataatcggttcaatgtcaacatcttcaacattctttggtgtaactgcgggaactggattaagaacaattgtttcatattgtggtaaagtgatgatatttcgttttaagattaaaataaagagaatactagttatgccaataagaagatatatatagtaatagtcagtaaaataattaaaaatagtatatttttgataataatcgtctacttgattccagactagatagccaagacgatcatcaggataatcaaattctttagctgaaaatgagtcatgatgactatattcgcgtgacagtttttggatacagtaactaaaattatatgcattttcttctgcttcgttatttattttaaacggatcatcatcaggggtcgatagtttatagtaaccgtcatcttgagtttttctataattttgcttaaagaaattttctaaatagttatatattttaatgtttgaattataataataaccattccagtcttcatctgatggaatctgaatatctagaaatggtgtatatagatttgtgagttcgcaagtaatggtagcagtagagtcattagagatatatacttcgtcattgattgcaaagtaaactaaattacttacgataatatggttatcggtaattgcagaataattaaaagttacattgattgttttagtcttatcttcatccatcaaggcaataagtttttcacatattgattttaatttttgatagctgatttcactgagtgaaacctcagcaatattatcaccatttttagcagcaaagtgccatctttcatgaggggctaagaatggttgaaaatcttcatcaaaggctagataaactgatgtgacgtttcgatcaatattagctataacaacatctgtaaactgtgaatagttatattttaaatcatcattaatatcatcagcaacatatttagttggccagtcatcttttattgttgctttatgtgcataatagccaaagtaagtgaagattgtagtaatcatcatcatggtgataatatagatacttgttattttggtaaatttgtttagtcgtaacatgattgatttcccctttcatcatatagtaatcaaatttatcaagtaaattaataatttcccctttttttaattttatcattattttgctttaaagacttgtaagataataaaaaagcagactttagtctgcttgattatggcatttagacttgaaaataatgccaccaataacgaacatacatgcaatcaccacaactccgtattttgaattatctgtaatttgagtagtaatccccattaataaagttcccataaatgaggctcccttaccaaatatatcaaaaattccaaaatattcactcgcctgactttctggaatgatttgagcataatatgatcgcgataatgcttgaattgcgccttgaaaaacagcaacaaaaacagctaatacccagaatttccaagctgtatcaagccataaagcaaagacagcgatgaaaaagtatccaataatgcaagaaaggatcaatgatttaacagggaattttttagcaagttttccaaaaatcaaagaaaatggaaaagctactacttgagtaagtaataaagctagtagtaaactattatcatcaattccaacatcttttccatatgaagttgccatctcaataatagtataaacaccatcaatatagaaaaagaatgcgataaggaagaagagtacctttttattatttttaatactagttagaacacgttttaaattattaataattggttctttagcggttgtataattaatttgctgatagtttttcaataatgggatagtaataaaaaaccaccacaaagcattcatgataaaggcaattgctgttgccataacagttgaaaggccaattgtatcacaacctaaaatcaatagtagactgattgtaaaaggaatacaactaccgatatagccccaagcatatccgtgtgaagaaacttgatcaacccgctcatatgtcgtaatatcaaccagcatagaatcgtaaaagatcaaactggtcgcaaaccccgttttagcaacgataaaaatagctaaaaatacaatccagccaactggaatagaaagggcagctaagcttaatactcccatcatcataaagaatgtaaagattggtttgcgcacacctttacgatcaccaatacttcccagcataggtcctgctaatgcaacaatcaatgttgaaattgaaatagcatagctgtagtaagcagtagaatcacttaaagatattccggcttcagtagctaagtttttaaaatagattggaataatagttgatactaataatacaaatgctgaatttccgacatcatataaaacccaatacttttctaattttgttagtttattcatagttgtaattaaatcgttttgatattgcagtattgttctggtaactgtaataatattcgattatctcctttgtggcaatatttatcgactggttaaaaagattaactaatatatcaatgttttcttcaattcttttttctggttttgcagtcatgaccattccacagtatgacttagcattaacaattttcattcctgttagaatcaaagatctttttaaaacactccggcaagcaaaaagatgattaaagcgtttaaatgattttaaagaagctaagatcgtggctggagctaaattaaaaaacggagcaataattttagcattttcaagattgatctggtaatgttttggggttgaatagttaaatgattcatggtttagtatcataaatcgctgatctaaatctcgctcgatttcaaagtgaccaatttcacgattaatcattgttttatcgatgtaaccatgacattcactatctaaaataaagtgattaataaaacccaaaatataggctaatgatttttcgtttggttgttcttttagaagtttcattgcattttcaaagaaagctcgtgcaatatcttggtgtagctgattacctaaagtattgacaggattttttttaagcggttgatagaaaaataaaatatcagggccttgaagaccaatattgtagagatttaaattatcattaataatttttttaattgtagtattttcaagcttatttaaaacttgattcccaaattgctgatgtgtataacttgccggcatagttaacctcccattcttggatattatataaagatatgatttgttgaacgagcatgattagtttaagattaggtaaatatttatttaagaaatcttttgattaaattatactgtaattcgaagaataattacaatttattaataataaaactgttcatttataatgaacagttcaatagattatatttaaaaagcaataattttatttgaaattatgttcaaatcgatatgatagagaacgatcatacttaattacatcaataaaattgtagattgcttcatatgattcactaatactttgattaaataaactttctaacttttctaagtatgggtcgactaatttatttggtctgtaatttacaacaaacccctggaatcgtttatatgtaaacgtgatttttaaaactaggtaaatcaagccccgtttataaaactgtggtgctaataataaacgatcatagaacttcatccctttaagactcttatagagttctttttttgttgctttaaaatatggctcaatgttgttgagcgtatgatcattaaccttaatgtgatcagttaatttagttcttagaggatctaaacgatctttgaccataaaataacgatcgagctcagtttctatttcaaaatgagttacaccagtttctttgataatcgtattaatatacgggtggcagttactatcaagaatgtagtgacagatgaaaccacaaagataagcaaattgtggggcacttttggtttcttttaagatttctaaagcttggtaaaaaaagatgtcagctctttctttatgcatagcactacctaaacgattgattttactatggatatacgggcggttataaaaaagaatatcaggaccatgtaatccaatatcaaatagatcttgattagtttccaagacatgtttaaggggctgatttaattcatcaagcactaattgtccaagacgataatgactataagctgccggcattattttagattatcgtattcattggctttaaaaccaactaatacactatccttagtttcaacaattggtctttttactaacatcccatcagtagctaacaattctaattgctcatcttcagtcattgtgggaagtttatcttttaattggagttctttgtattttaagccagaagtattaaagaagcgtttgagcggtaagccgcttttttgatacaaagcagttaattcttctttgcttaaacgttcttcaacgatatgtcgatcatggtgatcaatcccaagttcatcaagatatttcttggccttcttacaagtactgcattttggatattcaataaaatttatcatattctcacctcgtctatagtttaactcattttatcctattttaacaatgttatgcatagaaaaataagttataatttaacccggatatttttcctaacagttaggaaaaaagattgtaacttaggaaaatgaatgcgtgatatattataaaaggagctgataaagaaatgctaaacaaacgccaaacaaatattattgatcttttaaatgattatggaaaatggattactggtaaagaaatcgcaaaagttctaaatgtatctgaccgaacaattcgttcagatatagagaatattaataattattatgattgtatactgattcaggctaataaacgtctaggatatcgtttagatgagacattattgcataagcaggatattgaaactaaagatataatcccacaaacttcccaagaacgttgtatatatattattcaagaacttttgtttaaaagtcatgaaattaatttgattgccttgcaggatcaggtttttgtaagtggttattcaattgataatgatataaaaaagatccgtaaaatgattaatgattaccctagtttaaaactagttagatctaaaaattatattagtttagaaggaaatgaaacagataagcgaaagttatacaaacagttattgacggcagagacacaagggaattttatgaatttaaattcaattgcaggattatggaatagttttgatctattagaagtgaaagatatactagaagaaatttgtgaaaaatatgattatcagattcatgagatgacttttccaatgatcatgattcatgccggagtggcgattgagcggatcattaatcataactatattaagaatcaaacaattagtgaaaaattagaaagcagtcgagaatatcagatttcatatgacttctttacacaggttagtacgatgatcaatattgaacttgttactgatgaagtaattttatttgctttattattaatgggaaaaagggcaaatgattatcgtaaggatattatcaaagaaaagctggcagtcgatgttgaacatttagttgaagcagtaattgttgaagttaaggaatattttgatattgatttttcaaaagataaggatttaaaagtgggtttagcaatgcacttacaatcattgttagagcgtcaaaaaaataatgttcaagtaactaatgtctatcttcaagaaattaaacgtaagtatcctttagtatttgaaatggcagtgcgtgcaggcgaggtattagctgaaacttgtgaggttaatattaatgaaaatgaattagcgtttttagcgttgcatttaggagcagcgtacgatcgggtcaattctttaaaacgctatcgtgcgattatgatcattcctaataatcagatgctatcaaagatgtgtcgggacaagttaaaaattcgttttgaagaacgaatgatgattgttcaaagctatggcttttttgaagaatcgatggttaaggaagaagaaccggatttgattattacaacagtaccactaaaacataatttaaatatcccaacagtccaagtaactttatttattaattatgaagatgaaagtaaagtatttcagacactaaatattttagataagcatcgctatcatgatgattttgtttcattgatcaaagaattgatgcgtgaagatttatttcatgtaaaaaatactatgaataatcctaaggaaatcattgattatttatgtgatgaactgattgaaaaagggttagcaacacaaagctataaagaagatgtttttaggcgtgaagcagtttctgcaacttcttttgtaaatggatttgcggtaccacattcaattgaagtatcagcaaatgaatcatgtatatcaactttaattttagataaaccggtgatttggggtggttttgaagtgaaattgattattcttcttgcaatcagagaaacagataatcatttattgaaaatcttttttgactggttgagtagtattgtcagtgattcaaataaattcacccaactgttagaagttcgggaacatcaagaatttatggaacaagtaataatgtaaggagagaaagatggcaactaaagtagtaaaagcgaaaaaagaaagaaaaataaggtatgaagatgctccattagtaaaacgatttataagctatttaattgactggtatgtcggggctttatgtactgcgattccgattgcgattatttcacaaaagttaacgaatacaatgttaaatcaaaacattgttgaatttaaacagccatatgggatcattgcaggaattttagctgttttatttgcaattttttactttgtaattgttccagcttatatttatccggggcaaacgctcggcaagaaaatttgtaaaatcaaaattgttaaagtgaataatgagcaagtaacaataaaaaatatgctattaagacaattattgggagttattgtaattgagggtgttttatatactgcaagtgcaatctggcatgaactggttacgattattacccaaacaaattttgttacacctttgatgtatgcaggatttataattagtggaatcagtattttactttatttatttaaaggagaacatcgtactttgcatgattatttaggaaatactaaagtagtgctatgtaaataatttcctaagtctaggaaagatgactagcaacaataaaaaaattaattacttataatgttgattgtaagggtattggaggataaaaaatggatggtttagagttagtgagttttaaaattatatcagctgtaggaatggctaaatcaagttttatcgaagcaatgaaggttgctgctaatggtgaatttgatgcagctagagcaaaaatcaaggaaggtgaagaatcttttaacggtggacacttagcccatagtgaattgattcaacaagaagctagtggaaatcatgttgtaccaagtattctgttaatgcatgccgaagatcaattaatgtcagctgaaacaattaaggtcatggctttagaaattattcgtttaaatgaacgggtcaaagcattagaaaaatattaacaataacaaagggaggacaaagaaatgaaaaaagtttatctattttgtagtgcgggaatgtcaacaagtatgttggcaagtaatatgcaggatgttgctaatcaacataatttacctattaaagttgctgcctttccccacaataaattagaggagattatctcagaggatcgtccggactgtattttattaggaccacaagtgaaatacatgtatgaggaaacggtagaacaatttggtagccaaggaattcctatagctgtaatcgatcaaggtgattatggcatgatgaatggtgaaaaagttcttaaatcagcgattagactaataaaagcaaataaataaaaaggagggtaaaagaatgattaaacaacttgaaaaaatattaatgcctttagctgaagctattggccgtaataaatatttagtatcgattcgtgatggattcttagtatcaacaccattattgattgccggttcaattttcttactgattgcaaattttccaattcctgcatggacagaatggttaagttcagtagtcattaattcaaatacaggggagacattagctgcttttattgaaaagccatcaggagcaacctttactattatggcagtctttgctgtagtagggattgcttattcatttgctcgtcagatgaagactgataaaatatttggagcagcggtagctatcatgggatggttcttgatcatgccttatacggtagaaggaactgtagaaatggcaggtaaagaaataccagtatctttaacaggtatcccaactggatgggttggggcaaaaggtatttttgttggaattatctgtgcatttgtagctgtgcatatttattcatgggttgagaaaaaaggctgggtaattaaaatgccggcaggagtaccgcctactgtcgtacaatcgtttgcggctttaattccagcaactgttgtaatgactttcttctttgcaattaacttattatttggttttttaggaacaaatgtgtttcaaattatatttgaattcttacaaacaccattacttaatttaggagatactttaggagcgatgattattgcttatatcttcttgcatttattctggttcttcggagtaaatgggggttcagtagttggtgctgtatttaatccaatcttacaaacattgtcagtagaaaatattgaattctttaaaacgggtgttggtgaaggacatattatttgtcaacaattccaagatttatttgcgactttcgggggttgtggttcaacattatcattgattattgcaatgttattattctgtaaatctaaacgaattacagaattaggaaaattatcattagtaccagggatttttggaatcaatgaaccaatcgtatttgggttaccaatcgtgttaaatccaacaatgattattccgtttattttggtgccaacaatcaatattattatttcttatcttgcgatgtctgcggggttagtaccgatttgctcagggattaatattccatggacaaccccagtaattatttctggatttttggcaactaactgggttggtgctattttgcaagcagtcttactagtattaggaatctttatttacatgccgtttattaaaattatggataagcaatatattaacgacgaagctaatgcagttcatgaagcagaagaagacgatttttcattagatgacttatcatttgatgatttataggaggcaattttatgaaagtaattatgatttatgatcaaattcaatctggtgcaggaatcaaagatgaccatatgattcctttaggagctaaaaaagaaccggttggaccagcaattatgatggaacaatatttaaaaacagttgacggacgcgtgatggcatgtttatattgtggtgatgggtattatgaagcaaatcctgaagaagttagtcgtaaactatgcgcgatgattaataagttaaaacctgatgtagtaatgtgtggaccagcatttaactatttaggttatggcaagatggcagctaatattgcctatgatattaatcagacaacagatattcctgcatttgcagcaatgtcaaaagaaaatgaagaaacgattaatgaatttaaagataaaattcatattattgaaacaccaaaaaaaggtgggattggcttaaatgaatcattagatggaatgtgcaaattagcgaaagcattagttgatcatgaagatctaaatccgattacttcaaagtattgtttctaaactaaaaaggatgcggataacgcatccttttatcaaaaaataaaggaggaactcttagatgtggggtattattgcaacatggcgaatggccgtagaaggaatcagtaaagcaagtcaagttttagcagaaggtggtgacgctggtgacgcaatcgaaatagcggttagagaggtagaggactttccgtactataagtcagttggatatggcgggttgccaaacgaagaaatggaagttgaattagatgcggcttttatggatggtgatacattagatattggtgcggtagcggcaatcaaagattatgcaaatccagtaagtattgcaagacgattatcaaaagaaaaagtgaacaatttgttagttggtgaaggcgctgaaaaatttgctcataaagaaggttttgaaagaaagaatatgttgactgatcgtgctaaaattcactatcgtaatcgtgtaaaagaagttcaagcattggaaattaaaccctattcaggacatgatacggttggaatggtatgtttagatactcatggtaaaatgacttcggctacttctacaagtggcttatttatgaaaaaagctggtcgggtcggagattcaccgatttctggatcgggcttctatgttgatagtaaagtcggtggtgcaagtgcaactggcttaggagaggatgttatgaaagggtgcgtagcttatgaaattgttcgtttaatgaaagatggaatgcatcctcaggctgcttgtgaaaaagcggttaatatgtttgatttagaattaaaagaacgccgtggtcaagcaggtgatatgtctttggtagcaatgaataataaaggagaatggggtgttgctacaaatattgaaggattttcatttgctgttgctactgctgaccaagaaccaattgtttatttgacagaaaataaagatggaaaatgtatacatacggtagctagtcaagaatggttagataattatatggctacaagaacagcccctttagaagaaaaataagatggaagatataattttaaaaaaagttgatgatattgctgaacaaatgattaaaagtattattgaaattgtaaaaatcgatagtgttgaaacagctcctttagaaaatgctccatttggctcaggggtcaaagcagctttagatgctgctttggatttagctgcttcgttgggatttgtaacaacaaatattgataattatatcggatatgcaagttatggtgaaagtaaagattatatttgtgctattggtcatttagatgttgttccagttgggacaggctggaaacagcctccgtttagtgggtatgtagaagatggggtgatttatagtcggggaattttagataataaaggaccaatcttatcatgtctatttgctctttatgcacttaaagaattaaaacttgaattagctcatgagattagaattatctttggttgtgatgaagaatctggttttgaagatttaaaatattatttaagtaaagaaagaccgccgttaatgggatttacaccagattgtaaatatcctgttgtttatggtgagcgtggacgggctataattaaaatatgcgggaaaaaggatagattaaaagaattctttgatttggtcaataattatattttaaatgctaaaaataatggcgaaaggtttaatattgattttcaagatcaagaatttggattattagaagttcgaaattatcaattagaattagacggagatccaagtattcaatttagtgttagttatccagcgagtgtcacagtggaaacaatagtcaataatataaagatggtagttagcaattttgaagttaatttagtgggaaattatgatcctgtaaaattcccgctaaaatgtaaattagtaaagacattagtccatacttatgaaaaggtaactggagatgatggaacaccagttactacaaccggtgggacatatgctaagttgatgcctaatattgttccttttggaccatcatttcctggtcaaaaaggaattggtcaccaacctaatgaatggatgacaattgaagatattattacaaatgctaagatttacgccttaagtttatataatctagcaaaatgaaagtagggatgcagagtgattgaaatatgttgtggaagttatgaagatgctctaaatgcatattatggtggagcaaaaagaattgagttgaatagtgccttacatttaggtggtctaacacctagcattggttcattaaaattgacaaaaaatactacaaacttaaaggtaatctgcatggttcgaccacgtggagcgggattttgttatacagatattgaatttaaacagatgatgatagaagctaaggatctattagaaaatggagccgatggtatagcctttggatttttattaaaaaatcatgaaattgatattgaaagaaccaaggaaatggtttcactaataaagtcttatcaaaaagaagcggttttccaccgtgcttatgattgtgtaaaagacccatatgccagtattgagatattaattaatttaggcattgatcgcttgcttacgagcggactacgagctaaagccgctgatggtaaagatttaatcaaaaaattacaaacaaagtatggcgataaaatagaaatattagctggaagtggaattaacagtacaaacggacaagcaatcatggaatatacaggaatcgctcaaattcattcttcatgtaaagattggcaaaatgatccaactacaagtggagaatttgtaaactattgctatggaccggcagagcataaagatgattttgacatggttagtaaggaattagttgaaaaattagtgaaattaggattatgaaaaacaaactctggtttcgatatctaataacgattgtagcagtaattgcatcttcttttttgcaaacatacgctatcaaagtttttgtagaaccagctaatctgttatctagtggttttactggtgtagcaattttaattgatcgaattacttcattatatggctttaatttttctacttctttaggactgattgttttaaatgtaccagtagcaatcttatgttttaaaagtattggaaagaaatttgttatttcttctttgtgccaagtttttttaacaagctttttattaaggatttgtacattcccaccgttatttaatgatgttattttaaatgttttttttggtggatttgtttatgggatgtcgacagtaattgcattaagagggaatacttcatcagctggtaccgattttattgctttatatgtttctaataaaatgggtaaatccatctgggagtatgtttttattttcaatgccttgattctttgtatctttggttatatgtttggctggatatatgcaggatattcaattgtcttccagtttatttcaaccaaaacaatctcatcattttaccaaaggtataagcgggtaacattgcagattacaacaacccacccggaacagataattgaaagatatgttaaagattatcgtcatggtgtttcagttgttaatggttatggtggttatagtaaaaatccaatgagtttacttcatacggttgtatctgcttatgaggttcaagatattgttcaattaatgcatgaatctgatgaaaaggcgataattaatgttattcctacggaaaatttctttggcggtttttatcaacgcccaattgaataaaaaacaactgctttatttagcagttgttttttttgagaataacttattttaagtaactttaacataacgatcaaaatgatctcctaaaaaactgtttagttcacttttaaatttgggagactggttgatgattcgctgatttccaatcataggattaaagtagcgatgtttagcatttattttataataacctgcttttttattatgactaatatcaacttgatgaaaatgacaaaaagcttcccatttatcgcttaattctttgtctttgcagatgtttttaatgacagaactttcattagtatataaatcatcttgtgtgataagcttttttgtcaacgcagtttttaatagattagctaaatattccatacaatatcgattttcatcagaggtgtaaacacgactgcattgaaacattacttttgtcaacattattgctttatctttacttttaaagataatttcatcttttttatcattaattattaaatcgtaataaattgacttaatttgttcgactgataaaaaattataataatatgcgtttgcaagagtatattctaatcgatcagctgataatttaggactttcattatcggcaattggatatttatgataatcatagattagattaatatctatctcgtatttaagaaaaattttttgtaattcacgactattaaaaatcatcttttttgtttcagcttcagtagactcttgtttttcataatcattattcaagaagtcaataacatgagcgaatacaggggtggctatatcatgtaatagagctgcaacagtagcatgcttatcatgagtaaaatgataagttattaaagaaacgccaatactatgatcatatcttgaaactccaaaactatttttaaatgtttgaaactgtgtatattccattccacaattcattccaatatctttgaggcgagtaaagatatttgtgttcatgatttctaaaagatacggtggaatcgtatcatgatatattttataaaacattattatctctccctgtgttaattatagttgctcaaagggatcatatttaggaagtgatgatccaaattcttttaatgattttataagactattaggactccattcaatcaaagatataccatcaaattcatgaacgccatctaagtcaatacaactaaagtgccattcaacaatagaatgtttattagtgtgaataaattgtttaatttcccacttatctaatttaaagtgttcgtgccagtcattgaaccatttttttatttcaatgattcctttgtattcaggaccccaagattcactataataagcatcggattcaaaaatcacttcaaaattattccaatgggaatcaaaccatgattgaaaccattcaattattagatcttctttcataaaaattatcctttctaaattattaatagtacttaaagtatagcattatttgtgatactcgtcattttcttatctaagtccaaagcaaatatcttcaaagtttttggggataaagttttatatttaatgataactaatgttttttataatttaaaaatagtttttacctttagtaattgttagtatggtataataaagatagttgaaatttggagtaaaggagtgttaacaatgggttttgatgattttaagcagctggtagataatatgcaaattaatttatatcttacagatattcaaacaaatgaaataatttttatgaataataagatgaaagaaacttataatttgaaagatccagaaggtaaaatatgttggaaaacacttcaaaagaatcaaagcggaccatgtccattttgtccacttatcaaattaaaacaaattaataatttatatcagtcgattagctggcgtgaaaatagtgatcttactaatcgtatttttgaaaactatgatagtttaattaaatgggaaaatggtaaaattgttcacatgcaacagtcaatcgatattactgattctgaaatcctaagtcaccaggctagtattgatgacttatgtggattattaaatcgtcgtgctggaaaagaaaaactgctcgagtttatggtgaaaaagaaaaaagctaaagaaagctttacaattgctttattagatataaataatttaaaaagagtaaatgattcttttggtcatcaagaaggagattttttattaaaacaaattgcttatgcagtaaagcaggatcttgataaggaagatcttatctttagattaggtggagatgaatttgttctagtttttgggcataaaaatactaaggatagtgctaaatttttaattgagaatcaaaaaaatatacaaaagctgcaagctttatacaataagccttacggattttcatatgcttttggaatgtatacagttttaccaactaataaattgactgttaatgatgtgataactagagcagatgaacaaatgtatcaggaaaagttgcgatatcgtcgaactcagttagcagagttggaagatgtttcagtaggatctactaatgtagcttgttttcaatatgatccaacacaactttatgaagctttgatcaaaagtactgatgattttatttacatatgtaatatgaagacaggtatttttagatattcaccagcccaagtaaaagtttttaatttaccaggagaaattattgaccatcctttaccattttggaaggcaatcgtacatccccaagattgggaacgtttttataaatcaaatatggcaattggcgaaaataagatggattatcattctgttgaatttcgagcgatgaatagtgatggtgagtatatttggttaaaatgtcgtggacagttaatgcgcgatgaatttggtgagcctaatttatttgctggaataatgacacagttagaccgtcaaaataaaattgatcccctaactcatttatataatcgtcaagaatttgcgaaagcttttgagcttaagactaaagataaagcaatcgataatcttggaattatggttattgatattgatgactttaaaaatattaacgaaatatatgaccgttcatttggggattttattattaaaacagtagcccaattgactcaggcagttttgccaggtaatactagtatttataaattggatagcgatcaaatggggctgttgattgaaaatagtaccgaattggaaattactaaattatataatgagatacagaaacaattattgcatgaacaactattaaaacgttataaatgtccgattcaaatttcagctggatgtgcaatttatcctaaagatgggttaacatataatgaactaaataaatatgctgattattcattacaatatgccaaggataatggaaaaaataaattaactttcttttcaaactacatccttgagcataagatgcgttcattagaaattttaaaatatattcgtgaaagtgtaagtgatgattatcgtggcttcgagttaaattatcagccccaagttgaggtgagtagtaaacaaatcaaaggagttgaggcactgttaagatggcagtgtcaagaattaggaaaagtatcaccagttgaatttattcccattcttgaagagagcgggctaattatcccagttggtctatgggttataaagaaagcaattcaggcttgttcgaagtgggtcgtatatgatcctgaattttctgttagtattaatgtatctgcgcttcagatgttaaatagtgattttgtggaagatgtaaaaaaggttctgaaaaaagaaaagctggcacctaaaaatattgtcttagaattaacagagagctatatggttaggaacatggatttactaagaacaatttttgagcagcttcgcgaattgggatttaaaattgcaatggatgattttggaacggggtatgcctcattggaaattttaaagactgttcctgctgatattgtcaagattgaccaaacgtttgtacgtgatattaagattagtaaatttgataaaacttttattcgttttattgctcaaatttgccacgatgttgatattgaggtattgttggaaggaattgaaacagaagaggaatttaatgttgttgaaccgatggaattagattatattcaaggattcttgtttgggcgtcctcaaagtgaagaagaaattacgaataagttgatataaattaaaaatgctatgttatcatagcatttttaattttgcgtatttaatccatagtaataggagataatttcagaaaaataatataacataatacgattatcaatttgaataatagaatcgatactgctaattggtaaggaaatcgaaggtaaaacaaatgctaaatcaactagaggtaataattcagaattaccatcaatcgtgattaaaactatttttgcacctttagcagaagcttctttaataaagttttcataagtataagtagaaccagaaacactatagataatacaaagataatcttgattaatagagttaattagataggtaagctgaatatcctcgcgtacactttgaataaagcgattatgagagtataaagaatattctaactgactagcagcaaaataggtattgttgatcccaattgataagacatgtggatatttgtcaatcaatgatgctagttcttttagttgatgatcataatctagagcaccaagttctaaaatcgtattactgtattcttgagaaatctgactcagtaatgattcgttgctgagttttttttcatcgctatttttaaaactttcttcaacagaatatttgaattctgagtatccacggtatccaagcttttgatagaaacgtaggattgcagacttagaagtttcacaaaggtcgcctaaaacaacaatggagttattaacgatttgaggatcttctaagatacgagcacaaattttacgttcactaggtgtaaactcagtataatgaatggcaactgtttttttaaagtccatattaatacctctttttcttatttataattatatcgataaaccaaattaattacaatagagaaaattctcataacaaaaaataatattgataaatttctcaacagtgatataattgcaatgtaaacgcttttacataagagggcttttggacattatccggagatgtctaaaacaaaaaaggagagaaaaatgaaagataaatttactgcactgatctgtaaagtatcaggaaatcgctttttaaatgtattgagggattcttttgtattggttgcttcactgacattaattgctggatttgcaattatgatcagttctgtatttattgatcccaatgggattatttttggttcatctggacttggtctaggggagatgatctttggaagtgagaaagagttcttagcgtcaggatttgctcaaatgctagtacaaggacaaaatatttttaatttttttagtaaaggggctatgtcgatcaacgctctgttgattgtggtgattttttcatataatgtctcaagaaaatattttagtgataatcgtgagcatatggtttcagtgatgtatgctttagcagcattttttatttgtttgccttgggattttaattatacaagtgctaagggaatcgaggtcgatattaatggaattattaattcgaattttttaggtcaacaaggaatcttttttggactgattgttgcaggtagtgctacatttatatttaataaattatctaagttaaatatttcaataaagatgccggattcggtacctccagctgtagctcagagttttgaatctttagtgccggggatgttgacattatttgtctttattattgcaaccgttattagtaatacttttgctggtgaatcattaccggagtttattttaacaacgcttcaagcaccagctttagcaatatctaaaaccgcagcgtttgctctagtttcccaaattacatggccattattccagtggctgggaattcatccaactgctatttggggagcaatttttggaatgacctgggatattgctggaaacgaaaatgttttaggtgttgctaaacatttatatacaacgatgtttatgaattattcaactattgcagcgggaacatttgctttagcaccagtattatcgatattatttttctcaaaactaaaacaaaataaaaagattaccaaagtggctttagctccagcaatttttaatattagtgaaccgattacatttggattaccaatcattttaaatccaatctattttattccctttattattgtgcaaccattgtgtttctatattgcggtattttttactaaggttggttttatcccagtagtatgtaataatgttccttggacagtaccaccgattatttcgggaattttgtttactggaacaattgcaggcgggttagtgcaactaataaatctagttatatcaatggcaatatattacccatttgttaaaatagctgataaaatggaattagataaaatgactgaaaccgagaaattagaagcggtggagacaaaaagagtaagtttattaagaggcagaaaaaatgaaactaagattagctgaaatctttacatcgagaatggttttgcaacatggcaaagaaataaatatttttggaaccggtgaaacaaatcaacaagtaactattactattcagggacaaaccgcaacaacaacaataataaataataattggttgattacgctgccggcgctagaaataagtacggatgaaacattaatagtttcaactggattagaaactattacgttatcaaatattttaattggagatgtttattttttagcaggtcaatctaatattgaatttaaatttaaagattgtgattcagtaaaagttgatcaggaagtatgctatgatcgatatttaaggtattatgaagttccacaaattgaatatgaggatgaaaatatcaaaataccgcccattagaaatcaaggttggcaaatatgtgataatcaaacgattaatgatttttcagcaatcggttattatcttgcttattatttgcgtcatgatatagacatcccaatcggattaattgcagttaataaaggtggtacatcaggttcttgctggataaatgaaacatatcttcaaaaaaatcaagaaatcaaaaaagtatactatgatgaatattatcaagcaatcatgaatcaaacagaagcacaagaagatttagaaatagctaaatataaagagcgtgttaagcagtaccagcaaaaagtggcattatatcagcaaacttatccagaacgtaatatgagccagttaaaaaaggatgttggacatacaccatggccgggaccgcgggggaaaaaagatttttgtcgtccagcaggactatattacacgatgtttaaaaaaatctgtcaatatagtggtaaggcagttatttggtatcaaggggaagaggatactaaaaatgcttatttatatcatcaattgctacaactggtgattgaaaattggcgtgaagatatgaaagctcaaattccctttattattgtgcaattacctgaatatgatgatgataagaatgataactggcctattttaagagatgcccagcagcaggtttgtagagaagtacctgcttgctatttagttgtaacaatgaattgcggggaagaatttaatatccatccccaaaataaaaaaacagtcggtcatcgtattttttggcgaatcaaagaacttttttatgataatcaatttaatgggcattctccgaagataataaatattgaaaataattctaaaattataattgagtttgatcaaaaattacacagtagaggtattaataattttattttagaattaccagatcatcaagttgagacagttgggataattaaagaaaataaactgctggttgagcgacctgcccaagttagaacaattagttatggatatcaaaattattgtaagataagcatttttggagaaaataatttacctattgcaccttttaaaatacaattaactaaataatctgtcatttttatttaagagcaatgatatttgtagtgtcctaaaaagttagggtaactttaggcggtcactacaatcggctctttttctttttagttcagcaaaaagaaaaagaatttcagaatcttaaattactatttaattttattcaaaaagtcccctataatcgcataattgtgttaaaatgacttggagaaagaaggtggtaaaaaatgaaagtcgagcctgtaccccagtgttgcgatagtctagaggatcatttaccactaagatcaggtatctaatccccaataaaggaggaaacttatgatcgatacaattaccagcgatgagctgaaggatattcttttaaatggaacgccagaaacaataaaaaaagtaataactaatattcatccggctgatattttagatattcttcatgaagacgaggatagtattaaagcattaatggacaatcttcctaatgatgttgttgccagcattattgaagaggaagatgatgaagatgaccagtatgatttactgaaattattttcagatgctaaacaaaaagaaatcttagatgaaatgtctaatgatgaaatcactgatttgatcggtgaacttgaagaagatgaaaaacaggctatcttagataagatggacaaagaagataaagaagatgttgagcgactgttaacgtttgatcctgatacggccggtgggatcatgacgacggaatatattagtattcgtgcgcgcaataccgttgaaaaaactttaaaatttcttcaagaaaataccgaagaagatacaacttattatctttatgtagttgatccacaaaatattttaaagggtgttgtatctttacgagatattgttactagctcgtttgatacagctatgctggatattactaatacaaatgtaaaaactgtattatataatgaagatcaggaagaagtagcaaaaaaatttcaaaaatatggatttatcatgatgccggtagttgatgaaatggaccatttattaggagttatcgagtttgacgatattattgatattattcaagaagaaagtacagaagatattaatttattagggggagtaaattctgaagaaagactagattcatctgttggagaatcggtcaagagtcggattccctggttgattgttaatttatttacggcagtaatggcggcttccgtggttagcttttttgaaggaacgattgctcaagtagttacacttgcaactgttatgccaatagttacaggaatgggcggtaatgcaggaactcagtctttaacaatcgttgtacgagggctttcattaggtgaaatgagtaaagagaatgcaacctggatcatgttaaaagaagtagctgttggtttttgcagtggtgtgataataggaattatagttgcgttaggctcaatgttatttgaaggaaatccagtttttggtttagtaacgggattagccatgtttttaaatatgattttagcaaatattgcgggttattttattccggttattttggaaaaatttcatattgatccagctctagcaagcggagttttcgtcacaactgtaactgatgtattgggatttttctttttcttaggattggcaacagtatttttgccatatttaatttgaggtaattaagtatggaagtaaaatatgtgaaaaagaatattgctaaaatcataattagtctatttttcattattatgatgctgtttggagcagcttttgcattgatttggtttaaacatatttttaattatatgacatgtttgattgttgcgatcgtggtttttattgtaattattattcttaataaaaaaggacaaatttgtcgcaatgttgaaattggtgaacaagggttagttgatcatttgggaaccttggagtatcgcgagataaaaaaagttatttatgataataatagaattgaaatgaattatggttttgctaatattgtaacaaaataccatgaagttctgctcgataaacttcaagaacaaggcgttacaatgattgaatataatggtcgtcttattaattttgaaagagtttcacttttaattatttatggtttagggatatatttcttttataatttatttgttttaatttttggaataatttcttgcttaaactataactatgagattattaatagtcttggcatagttgttcgagttttgaaattaataagtattttgctagcactatttgtatataaccggttaaaaaataaaaaagcaacagtgatcattataattgtaattattgcaggatttattgtatggggacagtctgttaaaataaaaacataccatgattattatgggaagtttgcttgtatcatgaaagaacgtgagttaaatatttataaagatattatcgcagaatatggaattttagataaaacgattaataatttagatagttataaagttgcagatttaaccaattatgaaaaagtaattgtgtatcaaggaacgaatatatcaggacagtatattgtccatcgagatgtaaaaaataataattcaaaagagcagatctttgcttattataatgggaaaacttttactcacggagctttgcgtataacttttaatgatggtaaactagctattatagattacaatggagcggtttatgattatgataaactaaagctggttaatggttatattctcgaaatatataaagataatgaagtgaaaaagtgtttaatttttaattattttaaaggttatgataatgacgaatatcgtcgttcttgggaattggttatttctaatcttaatgatggtaaacaaaacttgtatattttaaaagattcagatgatgaaaaggtaagaccacaaccaaataataagtctgaaaataaaatagatgcacaaactgaaacagacaatgtagttagtgatgagattaaagtaagtaatggtgaaaagttgataaaaaagatggatagtattaatattacagcctttgaatcaaatgaagattttgttaaaataaaagctgacagtagtgattataatgaaattgttttagaggtggcaaaacaattcacaattataaataatactgataaaaaaatagatacacaaattctagggattactataatgtctggcagtcttgaggaatttggtgttgcaacaaatgatcgccaagatgttgaagatattggtaaagttaaaaatacttattactatcgaattagaaaagttggtaattattatttggcagcccgagttggtgatgattgtagtgtcaatgttggattaaccatgctagagccagtgattgcgacagatacttcacaaacaacagattttctttatcgaattgatggtaaaaaatatttaggaaatcgatggggagatataggaggatagagatggaagaaaagttagatgagatgattgtgttattaaaaaatattgataagaatttacaaattttagttgatgaaaaaaatgcagtaaaagtaaagaaaccaagtaatgatgcaatcttaaaacaatttgaagaaactgaaaaattatttaataaagtaatgaataaaggtaagtaaattataagcaattgctgtaattagtgcagttgctttttattattaaagaagatagctgtctgtttaatatgtttttgtagtcaattagggataaaaaaacaaaggtttttaataaacctttgctttttatatttctataattatttaaaactgtatgtgattatcttattgctttgctttttttaataacagttactaatgcaaataatgataaacttgcaacaataacaaatggtgcaatcattgttgaatcaccagttttaacacttgtagatgttgatggttgagttgctggtttttcagtatcgttaggagtatcactaggattatcagtaggagtatctggctcttgtagatccaaacgaattgtttcaccagtttctaaatcacgagcatatttactcataaattcccacattaatttagcatctggagtatagttccaatgtccccaaccataaatacgagccatgctgatttctacacctttggcattttcaattgcaccaacatcgattttagcaatattttcagcggttggctcaattgtatagcgttttgtccaaggaacaccatatagatatgcatcttcatctttgatgtcttcaacttgagtaacttccatatcatttaattcttgataaagttgagctacttgtaatcctgcatttaattctgttgtatcaaatgcatctttacaatattcatcaccatcaccagtgaagaaaataattggcatatcatatttatctttattagcagcaacagcttctttatttaagtcacttgcaccgaatggcccggaatgaccagctccagcagcaaagtatttagcatctgatagaccggcatttgttgtatttctacttccggcagataatccagaaatataaattcttgattgatcgatctgtggatatttctcttcaatgatctttaacattgtaataacatctgaatcaggagtttcattagaatcatcagtcattggatcgtatgtatatccttgatatgtatgaccttgccattcaggacaaattaagattacgccttcttcacttgctatttgtgcccatcctgaagtatcatattgagttctaggatcatttgtattaccgtggaatagaataactactgggacacttcctggttgagcatctttagattgttcaggaatatattcataccataatgaatcagtaccatctttatctaaatcttgagtaactacatgacgctcaatattatcgattgcatcaacagaatcaaaatattggtattttcttgcttgatcagcttctttatcaccagaaagtaatggtctagagtaccaagttgctgtttgtttatagacttcactatagttaccaattcttccaaatttttctaaaacagtattccatgcatcttttgttgcatcagcagcacttgtttttgtatcgctattaacaacaacgatttcataatgactttctgggttttcataatatccatcttttaccttaccagcattatttgcttttacataactattgataacagcttgatcatcagttactaagtaagtaggaacagatactttaacttcttgcccttgagctggattaattaaagcaagtccagatacaaagttcatataagatgttaagttttgattaatgaaagttgctccatcaccaatcccaattaatttaaagttatttgaaacaccaattttacctacgatcgtttcaaaacctataacatcatcatcagtaaaagaaatgccattagcaggtctagcaacataaactttgcttgccgcccgatcaacaatatcttttattcctgattcattaatatatttttgtgcttcttcatctgttaaatttccatcaggataaacaacgaaagttgcagcagcggcagcattgactgattcaatacttaatttatcgctaccactgtaaacataggcttcgctcatttcattaactgaggccttgtaagcttcaacatactttggtaatgtatctattttagcctttgcaccattgcttgaaagctcaattgcatcaggcgcccaggcaacttctggataaggttgtgaaatagttgtaccatctaatagaccgctaataacttgtgccatatcgttgaaatattgaattgacatttcgttaggtctttgggcattgtcttcccaaaattgttgccagcgatgaccagctaaaatagatagagaaggattttcatttaaaatagttctagctaaagcacatccttcgtttaaagcagcaattgggtttccaccatttgtttcaaaaagtgcccaaataaatccactgccaaatgtatcaccagtaaataatgctccatgagtggtatctgtaatcataagagagccttcggtatgagcactgacaacattgaatacatatggggcaccataaatgttaacagtatcaccatgattaacttttgtgattttactatcaaattgagtgattgcttccgcggcagcagcataatcaggttcactgatatatactttttcaacgtcaacgtctgcgaatactgtttctgatcgtccaaagccagtatgatcaccatgactatgagtaataataattgataacggcttatttcctgtcattgaatttacgattgtttttgcattttgaatatcttcatcgttttcagagccatttcctaaatcaactaataatacaccgtcttcttctagtacaaaatacatagatgatgggttatttgttacgccgctctcatctgttgcaccaccaggaagtttttttgttccctcatcccagtgataaatattatccttgattttctctactttgtaccttcctaattcagcatatccatcatcagtaagatctgttaaaaatgcatttccatttggatcaagttctactactttagatgctgttgatttggatccttggtctccttcggcctgtaccgcaccaataccacttaatgcgaacatcaggcttagggaaccaataaaaaattttttcttaaacatttcttttttccctccttcattataaatattttatcacagcggctttatgaaagcgattacaaaaactgatggtaagtatcataatttgatacctaatatcataatttgattgatatttatacaattaaatatgatataatcattaaataacttacttatttataaattaaaactgttaaatagaaactctacactaataacgatatttagtaattatatgattgagacataggatttatcctatgtctttttttgttttaaaattatcgtagcgaatctttctaactaaaaaatgagataataataacttacatctttgtaagataactatgtaataaaaaataattgtgtataataaaaaagaggagatcgttatgaaaatattaattattgaagatgatttagaattacgagaagaattaaaagttttattagataataatggttaccaaggaatcattctaaaagattttaaaaatgcgttagaagagattttagtaatagatccagatttgattctattagatattaagattccatttttgaatggacagcagctattaaaaaaattaagagaaaaatcaactattccagttattatggttacaagtaaagatagtgagatcgatgaaattcttgcattaagctatggtgctgatgattatattactaaaccatataatccaacgattttattactgcatattgaagctgtttttaagcgactccataaagctgaaccaaaactgacttatcaaaatattagggttaatttgatgaaaagtacgttagaaaaagatgatcaggaattattgttatctaaaaatgagatgggaattttttattatcttcttatgaatcaagggaaaatcgtaactcgtgatgatattatgaattatctatggggtacggataaatttattgatgataatactttgacagttaatatgactagactaagaaaaagacttgaaaagattggcctttttgatgtgattgaaacaaggagagatcaggggtatatgttaatatgagaataaaagaatacttactagatagactggcctatctagttttattaataattatgattgtgagcgtgctattcttcttattgatgtttaaagtttcaaatgcattaatttatgctattgttttagttatgcttttatttagtggtttgcttattggatatgattattatcaaaaacatgctttctataataattttcgcattaaattaaatcaattagataaaaaatgtttaattacagaattgattgctcagcctgattttctagaaggaaagattttatatgaggcattgtatgagattgataagtcaatgtatgaggagattgagacttatcaagataatcttaagaattttaaagaatatattgaattatggattcatgaagttaaattaccaatttctagtgtaaagttgatgattcataatcatgaacataatgaaagaaaactaaaggatcaagttagtcgaattgaaaattatgtagaacaagttttatattatgcccgacaagatagtagtgagaaagattatttgattaaacaatgtgaattaggaacaattattagaaatgttattaagaagaaccaagatagtttattgtatcaaaatattaagatcgaaatcggtcaagttaattgttctgttttaagcgatagcaagtggctagaatttattattaatcaaattgttagtaatagtattaaatatcggcgtacagataagtgtaaaatagcttttaatgtgattagaaggaataatattgctttagaaataattgataatggtctgggaatcaagactagtgatctaacgagagtatttgaaaaatcatttactggtgaaaacgggcgtcttgtttctagttctacggggatgggcttatatattgttaagcgattatgtgataaattaggtcataagattataattgaatctaaatatagtgagtatacgaaagtaacaatttcttttaatgatgagcaatattacaaggttgtaaggtgatgtaagttatttcgatgttaccaagaccgccttttttctataatttaattgtaaaggagaaaagattatggaaaatattctaacgattgaaaatattagtaaatattatggaaataagagtaatcttactaaagctatcagcaatatttcaatgaatgttgataaaggtgaatttattgctatcatgggggctagtggttcagggaaaactacactactgaatgttatttcaactattgataaagttacaagtggtcatatttatattgaaggtcaggatattacaaaacttaaaggtaatgatctaaataggtttagacgtgaagaactaggatttatttttcaagattttaatttattagatacgctaacagcttatgaaaatattgctttggctttacaaattcaaaattttaaagctaaagcaattgaacagcaaataaaagttgttgcaagaaaattagatattgaagatattttaaataaatatccttatgaaatgtctggaggacaaaaacagcgtgtagctagtgcgcgggccattgttacaaatcctaaacttgttttagcagatgagcctactggagcgttagattctaaaagttctaaaatgttattagaacgacttcaaagattaaatcaagactatcaaacaacgattctaatggtaactcatgatgcttttagtgccagctatgcttctaaagtgatttttatcaaagatggaaaggtctttaatcaatttaatcgaggtgaagctactcgtaaacaattttttgataaaattattgatgttgtttctttgcttgggggcgatgtaagtgatgttatttaatctttcattaaagaatattagaaaaagttttaaagattatgcaatctatttttttacattaatccttggagtggcaatcttttatatcttcaattctttggaaagccaaacagttatgctgaaactaaatagttcaactaaagatattattaaactaatgaataatgtgttgtcaggcgtaagtgtatttgtttcatttatattagggtttttaattgtctatgcaaatcaatttttaatgaagcgaagaaaaaaagagtttgggatatatatgatattaggaatgtcaaaaaaacagatttctaaaatactattagttgaaactataacaattggtttgatttcattagtaattggtttagtcttaggagtcgctctatctcaagtaatgtcgattgttgtagctaatatgtttgaagcagacatgactaaatttacatttgttttctctttaagtgcgtggataaaaacaatgatttattttgggattatgtatcttctggttatggtttttaatacgattcaagtgaatcgccaacaattaattaaattattgacagcaaatagacaaaatgaagaagttaaattaaagaatacctatctttgtatagggatctttattggtgctgttgtattattaagttatgcttattataacgttactgcaggagctggtaatttaacgaacagcagctcagtgcttttccaaatgatttatggtgctgtcgcaacgtttttaatctattggtctatttcaggtttgattttaaaatttgttatggcatctaaaaattattatttcaaaaatttaaatagttttacggttaaacaaattagtagtaagattaatacaacagtactttcaacaacggtaatttgtttaatgctttttttaacgatctgtattttttcaagtgcttttgcgttaaataattctgcaacagaagagataaatgagttagctccagttgatattcaaatgcaaaaagatgtaagtgttgataatttatcaattacaaaatatttgtctcaaaagcaaataggattagatgatttaaaaaacatttatacatttatgacttatcgtacttcacaattgacatatagagatacttttggcagtgcctttaaagatgtaagtgaaagttatttgaataattgtgaagatattattaaacttagtgattataataaattggctaaaatatataatttaccaacttatgatttaaaagacgaatatgttgtaatggggaattatgaaaatttaatgtttagtcgaaatcaatttcttaaagaaaaaccagctattgagttaaacggaaagatatatcagagtaaatttgataaatgtcaaaatggttttttatcaatgcagtctagtcatatgtgtatgggagtgtatattgttccagatgaagcggttagtaattttattcctgctgatagttatttagtgggtaattatgctgcaaatgatcaggatacaagaaacgaagtagatgaaaaaatgcacagttatagctctgatgtcttattgattaatacaagaattcaaatttcaagtagtagtgtgtctatgggagctatggttatctttattggtttatatataggaattgtatttttgatttcttgtgctgctatcttggcactcaaagagttgtcacaaagcattgataataaaggaaaatatcagattttaaggaacgttggtgttgatgaaaaaatgattaatcgttctttatttaagcaaatagctgtttattttgctttcccgcttatcttagcattgattcattcaatttttggtatccaggtttgcaatataatgctgcaaacatttaatcaggctaatgtatttgatgctattataacgactggaatctttttagttattatttatggtggttattttatcatcacataccagtgtagtaaaagtattattaaagataagtagaggattatactgacgaggggattaacttcaattttatatactagtaattgaggtatagattatatgttatgatgataacaagtaggtgataaaatgagtgagtttgaaaagatgagagcgggagaaatttataatccccgagatttaaaactgatctatatgtatgataagacagcgcggcgtttgcataggtataataaaaggtgttttcatgtatataatatgcgaagccgcttaatgaaaaaaattattaatacaagtggtaatttttggattcatccgccatttcaatgtgattatggctgtaatatctatttgggaaaagatgttatgattaattacggttgtgtgtttttagatgtttgtgaaattaagatcggtgataatactctgattggtccacatacccaaatatatactgcctgtcattcaatcgatccacaagagcgtttaaaagaaattgaatttgggaaagcagttaccattgggaataatgtttggattggtggaaactgtactattttaccaggagttacgattggcgataatagcgttattggagcaggcagtgtggtaactaaagatgttcctgctaacgtactagcttatggcaatccatgtcaactaaaaaagaagatatgattttataaagttcttaagcttttgctaagaacttttcattattcttgacatttgtccagcaatagtataaatttatatcatactaatacagtaggaaaagaggggtaggatgatttccgtaaagatattaaaaaataaaaagatttttgaatgggaacgaatgtatggctgttgtcataattaataatgttgttaaataaatttattaaggaaagaggacagttaaatgaatataaatatttttgaattaggagccgtgcttcttgcaggtgttttcttcgcaattatctattttctaggtaaagtgaagaagtatgattttgggcttttaactattttaggattagtttttggggtagccgtaggattgatttttaaaggacattatttgtatttagaagcaatcggaacgatttattcgcatttgatcttagcgatcgttatcccgctattattattcagtattatttcaagtattacaaatttaggaacatcgatcaaattaaagaaaataagtgccaaagcgataatatttttattattaaacaccctactagctagtactataacactgaccttagcagtagtaactaaagttggaagtggcataaattatcaattggcaagtgattataaagcggtggaagttccggcattcatcgatacgatcattaatttatttccaagcaatttggctaacagttgggtaaatggcgaagtagtacctattgtaattttcgctgtaattgttgcgattgcctacaataagattgcccgtaatcagcaaaaagctgttttaccgtttaagcattttatagatgccggaaatcgtgtgatgggagaggttgttaactttgttattagctttacaccgtatgctgtattagcattgattgcacgtgcagtaagcaagagtgctctaagtgatctgattccgctattgagcgtcttaggattagcatatttattgagtataatccaaatttttggggtaaccagtgttttattaaaggtggtaggaaagttaaatccgcttaatttctttaaaggaatttggccggctggggtagtagcattcacttctcaaagtagtattgggacaattcctgtcactgttagacaacttacaaagaaactaggagttaatgaagatgttgcttcatttgtagctagtttaggggctaatctaggtatgccgggatgtgcaggaatttggccagttttattagcagtcttcgcaataaatgttttggggattgattattcaatcggtcagtatatatttttaattgttttagctgtagtagtatcaattggaactgttggggtgcctggtactgcaaccattactgctactgcattatttgcttcagcaggcttaccgattgaaattattgttttattagcacctatttcaagtattgtagatatggcaagaacagcaactaatgttgttggtgccgctagtgctgcaatgttagttgcccgaagtgaaaatgaattagaccttgctgtttataataatgaaacaatcggacagccggatttagaaataatttaaaaatagaagctatgaagataaattcatagcttttttatgttcatattttagtgaaaacaatctatctggaaaaataatcaagaatagttatttttctttatttgtataattttgacatttttatgattttgtttcatataaattattgataaagccaaaaatgagcatgtttttatataaaaacactggttaaagcggtataattggtattgtaatatgatatctattgtgatatattgtaaacagatattagatagaggcgcgaattgttaagaagtttttaccataagatgcaaaccaggtaaaaagggaggagcgttcgccgaagagataaatgattgcatgcgtttatcctctgggcttatagtgaagatctataagactgtcattatcaatagataatggtgagctatcattgttcatacgctgtttatgttgcaatgatactcattgcaactttttttgtaaaggagaacaatgatggaaaatattattgatgcagtgagctacgaagaaaatattattcaattacaacttagaaatgttcctaaacacccaatgattattgccaagatatttacaatcttgagtgagtgtggggtaaatgtagatatgatttctcaagtaatgattgaagatgcgatgcaaattgagattacacttgatgaaaaatatcaaaagaatcttaatgatgcaattatgagattaaaagatgaggttaagcaattagaaattgcgactaatcgtaaatattttaaaattgcagttgggggaaaattactagaaacgacccctggggcagcggctaaagtatttactattttaggggataacaacattcatttttatcaagtaacaacctctaaacgaacaatctcgtttattgttgataagaaacacaaagaattagcaatgaaaaaattagatgaagcttttggcttaaatatataggaggaaattatggctatttttgaaggtagtgcagtagcactagtattaccaatgcatgaagatggaagtattgattatgatggatttagatgtcaggttcaaagaatgcttgatggcggtgttcaagctttattagttaatggaactactggtgaaactgcaacgattcatattgatgatgaatttaaattattagatattacattagagatggcagcgggaactggtgtaaaggttatcgctggagcaggatcaaatgacaccgcaacagctttaaagaaagcacattatgctaaagaaaaaggggctgatgcaattttagttgtaactccatattacaataaaacaagtcagcgtggtttgatcaaacattatacgacagttgctgatgcagtagatattccaatgattttatataatgttccaggaagaacgggaataaatattaatgttgcaacagttgttgaattagctaaacataaaaatattgttgctatgaaagatgcaacagataatattgcatatgcaatggaagttttagctaaaactcaaggtatggattttgatatgtattcaggatgtgatgataatatcttgccatttatttgtgccggaggaaaaggagttatttcagtattatcaaatatttatccacgccaaactgaattgttggctcaattagcattaaaaggtgatttacctaaagctcaagaattggcctatgctcttgagccggtatgtcgctatttgttcattgatgttaatccaattatgcctaaagctgcattagcaagaatgaatgtatgtaaaccgacattgagattgcctttgattgaaacaaccgaagaaaataaaaaattattgtttgatgcgatggatgcatttgaaaagttggggttttaagatgaaagtattagtatatggatatggattaatggggaaaaagattgcccataaagtaagaagtcaaaatgatatggaattaatgggaattgtaagttatgaatttgatgaaaaagttcctgaaaaaacatatagttcattaaaagagtgcgatgaaaaagccgatgtcatcatcgacttttctcatccgaacaatttaaatgatattttaacgtatgcattagcgaatcaaacaaaattagtaattgctacgacaggttatagtcaagaacagcttgatcaaattaaagaagcatctaaagaaattgctatctttcaatcatataacacatcatttggggtgcagatggttacaaaaatgttacgacaattcgcaaaagaattttatgacgcaggatatgatattgagatccttgaaaaacatcataatcagaaaattgatgcaccttcaggaactgctgaattattatatgaagttatggctgaggaaattgatggcgtagaagcgtgttatgatcgcagcagtcgtcatgaaaaacgaaagaaagaagaaattgggatccagtcattgcgtgggggaacaatttttggggaacacacgattatgtttgcgggagtagatgaaattattgaaatcaagcatacggctttatcaaaagaagtatttgttcaaggtgcgattagtgctgcttatgcactaaatgataaagataatggtttatttactttaaaatcattatattaatagggggaaaatatggtcttacaaacggaatttgcacaaattaaaaataataacttatacatagatgatgttaaagcaacagagttagcaaaaaaatatggaacacctttatatgttatgtctgaaggacatattagacatcaatttaataaattaaaaacgaaaatgattgaaaagtatgaaaatacactaccattatttgcatcaaaatcattttcttgtattgcaatttataaaattgctaaagaatatggtgttggaatcgattgtgtatcagcgggtgagatttcagttgctttaaaaagtggatttgatcctaaaaagatttatttccatggaaataataaattaccatcagaaatagaatacgcgttagaaaacggggtagaaaattttgtaatagataatttttatgaaatagatttagtccaagaaattgcttcgagattaggtgtcaaaataaatgggattgtcagaatcacaccgggggtttatgcaggaggtcatgactatattcgagttggtgccaaagatacaaaatttggttttagcagccatgataatacatatctaaaagcaatcaaaaaggtaattgatgctccaaatattaattttgatggaatacattgtcatgttggcagccaaattgaagatattcaagcgtatgttttagcaatgaataaatttgttgaaattgcttatgaaatttatgatatttttggaattgtaattaataaattaaatgcaggtggtggttttggaattgcttatacagctgctgataacccattagaatttgaaacagtagttgatacgatcatggaaatcattactaaaggatttgatgctcggggattaaaacgtccgatggtcctagttgagcctggtcgttattgtgtaggaaatgctggaatcacattatataccgtcgggtcatctaaatatattaaagatattcgtgattatattacagttgatggtgggatgactgataatattcgttctagcttatatgctgctaaatatgatgctattattgcaaataaagcagaaatgccgacggatcacctaattactgttgctggaaagaactgtgaatctggggatattttaattaaggatattatgttacaagacccagagcccggagatattctggcaatgttttcaacaggagcgtatcattattcaatgtcatcaaattataatcaattgccaaaaccggcagtggtatttacgtatgaaggtaaggatcgtgaagtgattcgtcgccagacatttgatgatttagtttattacgacattgattcaaaatattaattaaagcggcatatgccgctttaaacatagatggaggaatttatggaattaacctataagaatattaaagagatttcgcaagagagattagttgatttatttaaatcggtagagtgggagtcagcgaactatcctgctcaattagtacaggcaataaaaaactatggaagtgtttttagcgcttgggataatgataagtgtgttggtctggttgcttcgatggacgatagtatcatggttgcttatgttcattatgttttagtcaatccacaatatcaaaaatatggaattggtaaaaaactgatgcaaatgatgctggaacattataaggactatcataaagtttgtttgattggtgtaaatactgctgttggtttttatgaacatcttggttttgaagttaatgaaaaagcaaaaccaatgttttatctgaataagaattattaataaaaaatgactttttaaggagtcatttttatttagtcttatttttgggcaattacacaaatagttttacttgttttatcatatttttgtccaatgacatctttataaaaatcaagtttagtaaagccggcattttttaagtctttctctaattctttcagggaaaaagtatgttcccagatattataagtagttattctatcttcattaatgacagtatactgatttaaaaatgtatggacattatcataacgataaaaagcatttaaaactaagtgccagtcattatgccaaaaaccattttcatttatttgccaatttttatgttctaccgctccatcatattgtaaaggagtaaagacatcaaataataaagcgcctttgggggataatgtgttatagatcttttgcaagagctttttcctagtagcaggaggaaggacaccaaaatcacaataaattaaagtaactaaatcatagtgctgtctaaagttcgatttggtatagtcactacgaaggtaaataatatcaaatcctttttgtttggcggaagcttgagcataactgattgaccgttttgatagatcgataccagtaacctgataaccatactgatagaataattcagcataaataccggggccacaaccaagatcaagtaagttgttataatgatgattaggtagtacagtattgatccaggcaactgatttttttacaaagtcaagtttacgggtagctgattcttggttctcgttaagatgagcttttaacatgccttttgaaatatgagggtcgtcccaaatacttgctgtactttgttcaaataatttaggtcgcgtatttaattgttttaatatgtctttcatcgtgttttgtcctttcgtatgatccggtaactagataaaataaaaaactgtggttatttccacagttaagagttttgactattaatgtggaaattaaaataatcatttgggcataacaataaaacctgtttttgacaggtaaaaaattatgcatttttgattatctaagttttccacgtttcacttatgttactgattatgtaacatcaagtgcgccggacaaaatcatctccttaatagttaccgtaattaaattatatagtatttgtaaagtaaaaacaattaataaaagccataactgctatggcttttattaatttataatttgtctgttttaagacatagataatcaatttcagcaggagttaatcttatttttaacgcctcagcacatgaatcaaattcacttttattacgactgccaacaatagctgcaacatcaaatggctggtcaagtacatatgcaagggcaatattgattgaaggaacccctttgagttttcctaattctttagcccatttgttggcaatattctactgccgcttgaacacgatctagttcccaattggatacaccataagtagtaattaaaccttcttgacgatgctgttctaaacgatccattatttcattgacagggacactaggatcatcgcgatgaagtaagtaaatatcaaaatgatcgcaccctgtatgaagtaaactataatgaagatcgtcagtaataatatctggctttactcgccaatactctggatgatggcagccttcaggggtaataattgggtgacatgctttatccataattactaattgatcgcgattattacgagaatcaaaccatttttttaaaactcgttcagattcacaagcatgttctccatctttgtttgccccataaaatctacctgtgtcgattactgttcctccagcagcaacatattgatccaacattgtaaaaatttcttcttcaaaggctggattaaaccaggctgtacccataattaattttgaaatcggtttgtctaaacctttaatgttaatatattccattttttcatctcttaagcagtttttttgattaaataagtatttaagataagaccgatgattgcaacaccaatagcaactaaatagacattgttataggcaagggggccggcttcactgttaacaaaattagcagctatctgaggtccaaatagagagccgattgaattaggaataattcatacactatcatcacaatatattccagatacaatcagaggttatctccagcaatatccccaaacagagtttaaaattcaaactgataaaacagaaaatattattaaagggctaaaagaacataaatatgatataggtttttgtggaaaaataattgctccagaattagtttttattcctgttttatatcaggaatttgttgctgttgttccaccagatcacgaacttgcaaataagcaggagataagtttagaagaattagtaaactatgatttagtaggctatcttgatgatttagtaattgctcaaacagttaaagaaatttttgcagaacataaattggagccccgctatatttctaaacaggaaaatgaattattgattggtgggatgatcaatcaagggtttggtgtaggaatcgctgctaatacatcatttttaaaagaatttgatttaaaggtcatttctttaaaattaaaaaaagattaccgtgtaatctatctagtttataataaagtagattatatttcagcagctgcagaaaactttatcaactatattgcaattaataaaataaatttataaaaaattgctgaaatgcagtaactctttaatcactgtttaataattttgttgtctgtaaagctcttgctaagataacataaataataatgccaccagcagtctgcatagttagaccaggtaaagctccaagtgcagcgggccaagtaaataaaaaagtttcagctgctgtataagctataatttggaaaacgccaccaccaattgcacttattattttacttggatactgttcccaaataattcccatgatccaggccataatgaatttaataattaaagttggtccgctccagatagctgcaccacatagtaaatcggctaaagcacctcctaatgcaccagcaaaggcaccatctcttttacctagaatcaatacacttaaaaagatcatactgtcgcccatatgaaagtatcctccagtagctggattgggaattctaatactgaatgttccaacaaaaattagggctatcattagtgctgtttttgcgagttgatttgttttttcattaatcatttctaatccccctttagaattgataatataatagcaaaatattgaccatatcttaataaccaataataagatattttaaaaggacagtttaaattaatatagagaaaaagtaatctatgtagtgaccaactttaggaggtcactttttatatgaagtagagtaaagaacttaaattagaatgtatttaaaaacataaaaaatggtgaatgcataaaaggaccaccaggaattaaacatgaagtttttataattaagttcttcgctggtctaggatatttgattcacttggagaaataggattagaacatggaagagcaaccatatctgttgaacaaagaatcgaattgattaatagagtttaaaacaagagaacaactcaaagctgcaatgagtgaatatatcgaatattataataacgagagaatcaatacaaaaagaaaaggattgagtccacttgcatatagacaacaatcctttcaagatttagctttaatttaatgtgtccaactttttgggaatactacactaaatcacttttttctttggtttatttaattcctcatggataccttgcattttataatccagattagaaattgttttagcacattcaattagctcatcacgaactccatcaggaacttcattatcagctttatatcgcaagtgatgttctaaacttgcccaaaagtccatcgcaatcgttctaatttgaatttctacagtagttggctgaactttctctgctaagaagataggaacttcaacaactagatgtaaactacgataaccattctccttgggatgtttaatgtaatcttttttggcaataagtttaatatcactttgttttattaataaatcagcaattttatagacatcgctaacataattacaaataacgcgaacaccagcaatatcagtcaaattagttacaatagaatctaaagatacttctaggccccgtttttctagttttcccaatatactgtttacagattttaaacgatattccatatgatgaataggattatgatcatgttttattttaaactcatcatcaagaatttctaattttgttcttacttctttaattcccgcatcataaagttgttgcagcgccataaattcttgtaaagtgtcagttatatctgtattaggaactagtgcggtaaaaggatcactgacaatttccttttgcataattcgattagtcataaaatacccctttattaaatattttttgtataacttaatcatagttggtaataatgaacttgaggtgaactagatgaaaaaaacaattgtagtattattaattatgatgaatattgtatcagtaaatgcttcaagtaatgacccaaaatataaaataattgccaatagtaatagtgataaagatattaagacaatgtatgaaacaaaagatgacttaattaaagactataaagattggattaaaagtgttgatgatgttgatcaagcactagctgatcatcaaaaagattatcaagctaagtattataatggagaatatacaattgtcctaggcgctggcaaaggaaaggaacttacgggtactttgaaggcaagttattgtgtaagtagtaaagaaattaaaaagaaatcattttttgcagaattattttcttaagattatcagtgaagcgaatccttctagttggttatatccaacttttggaactcactttactgatagtcttttattatgtcctaaatataactgaaatatgctatactatttaatagagtagtaatgaaaggagtcagagatgaaaacagtaaaagatgctgaaatcttttgtcaatatatagcccatgagtatcttgggaagcgtaattataagttattagaagatataattgataaaaggattacaatcattgggacgggagctcacgaggttagtcgcaacattcaagaacttatgacggctttgaataaagaagcagaactttgggatggaacttttataattgaagatgaatggtatcagggaactgaattagctgataacttatttgtagtaattggccaaattgagggccgacaaaatagtaacgaccagttagtctatagtttttcatcacgagtaacctttattattgaatatcatgatatgcagtggaagattatccatgttcatcaatcagtaccggattatagtcaaggtgatgatgagtttttcccacaacggattgtcgaagaaagtaatgctcagttaaaaaaggaaattgctgaaaagacgaaggaattagagatgtccaatcaacaagtaatctataatttaagacatgattatcttactggaatattaaatcgtccatcacttgaaaaagaagttactgaagcgatgagtaatcatcagtatggagtgatcttagtattagacatagattattttaaagaagttaatgataataatggtcatccgtatggtgatgaggttttgataaaattagctaatacaatgcaagaaagttttaaatcaggaatttgtggtcgcattggcggtgatgaatttatcatttatctggctttagacgatgctaattatgatgcaattgaaaagactattaaagaatttaaacaaaattggcagaagaatattacaacaattgatagaagcagcacaattactttaagtatcgggggagcatattatcctaaacatggtaaaaattatcaagagttgtggtctaatgccgataaagcactatatttaagtaaaaataatggtcgaaacagaatatctatatatcaactctaaacagttctcgaaagggaactgttttatgtttaaaataaatcgtttcgttaataatttaagaggtcaaacatataataaaattagaggtggaacatgttaacaaaatttgatgaacaagcccaaaaagcaattgtggtaggcgaaagtattgcttttgatttaggtcataataatgtcggtagtgaacatttactgctatcgctgttaaagataagtgattccaaattacgggaattagttaagaaatatgatgttgatgataaaaatatatatgaggatataaaaaggttgtttgggacaaatgatgatcaacctttttatatggagtatagtgatgctgtaaaaagtatcttagaagcagcaatggaaatcactaatcaacaaaataaaagtaaagtaacgcttaatatcctaacaattgctttattgcagagtgaagaaagtgtagctcacgaattattaaagaaatataaagttgattttgaagaaattatctatcaattaaatgaaagtagtgaattagaaactaaattagatcagattcaatcactagttaatcttaataagaaagtaaaacagggtgaacatttaattgttggtagacaaaaagaattagaaaaattatgtatgattttaagtaagaaagaaaaaaataatgcgttgattattggtgaagctggtgtaggtaagtcagctttagtagaaaaattagcgtatttaattaatcaaaaacaagtaaatgaaggattaaaaaagaaaattatttatgaattgagcttatctagtattgttgcaggaacaaaatatcgtggtgaatttgaagaaaagctacgaaagattattgataaggtaaaggaaatggataatgtcatcatttttattgatgagatccataatattattggggctggtggcgccgaaggggctattgatgctgctaatattttaaaaccgtatttagcgagaaaagatctaacgattattggtgcaacaacgacagaagaatatttccagcattttgaaaaggatcaagcaatgaatcgacgttttagtgttattacactaaaagaaaatactaaagaagaaacattagaaattttacagaaaactaaattattttatgagcaatttcatcagattgaagtcgataatgaagttttaacatatttagttgataatgttgatcgttatatcaaaaatcgaactttccctgataaagccatcgatatttttgatttagcttgtgttaaagcccgatttaagcagcaacatattattactaaacaaattgttaaagatgttatagaagaatatacatcagttaagataagtgaggattatgattatgatgaaattaaagcaaaattgaatcatcatattattggacaaagtaaagcgattgaacaaataatcaatcaattaaaattaacaaaacagtcaaaacaaccaagtgcagtaatgttatttgttggaaatagtggtgttggaaaaagtgaaagtgcaaaacagctttcaaaacttttggggcgtaaattgattcgcttagatatgagtgaatatcgtgatagcagcagtgttcaaaagataattggagcagccccgggatatgttggttatgataaaccaagtttattactgggacaattacaaacctatcctaaaagtattattcttttagatgaaattgataaagcaagtcaagatgttataaatctttttcttcaagtatttgatgaaggttatttagaagatagtcataaacgaaaagtatattttaataatacaattattattatgacgtcaaataaagggactgctaaaaatacattaggatttaaaaagaataatcatagtagtaaagttaagaatttttttagtgatgaattattaagccgtatcgatgaaataattaattttaagaatttaacaaaaatggatttaaagaaaattattcgtaaaaattgtcctcatgaggttaaagaagaagatattgagttgattttaaaggaatatgatatgaaacttcaaggaagaggaattgttaaagcagctaataaatattttcaaaataaagcgaaggcccaaagttaattgagtcttcgctttttccataaaataattaatagtgtgatgattgcaataatcagtgcgtattgtttaacatatttactaattaagatccagttatttcctaaaataattccaagaactactaaaatactattccaaatgattgtaccaatcaaagtataaaatgagaaactaaagaagttcattttagtaattccggcaggcagagaaatcaatgatctaacaatcggaatcaagcgaccaataagaacagagatttttccatattgttcaaaccagttaagggaacgggatagatcatgacgtttaaaataaaatcggactagaagcttttcgagtcgttctagattgattaagtagccaaaccaatatagaatcactgcgcctaaataagaaccaagcgaagcaactgtaattacgcctagaggtgttaggtttgtgatcgttgtcatgaaaccgccaaaagttaaaattatttcacatgggataggcggaaataaattttcaattgcaattaaaagaaagattgccttgtagccgtaggcgttaatataagcgagaaggtttgtgagcataagtgacctcctgttttgataatgggattactttattagccagatagatcaataagttatcaaatggtaatagaataatagttgaaatgatattaaagaaagtatgcatataagcaatttgcatcatataatttggagtcaaggattcgatgaatgaaactagtgggataaattttgctaagattacaaaaataatagttccgagtacattaattaagatatgaatagcacttaaacgttttgaactgcgatcgccattaagtgatgctaaaactgcggttatacaagtgccaatattttgaccataaataacattggtagccattgcaaaactaattaatcccttttgataaatagtttgcaagacgccaactgatgcagttgagctttgaatcaacgccgtaaaaactgttccaactaaaatagcggttaaaggattgtctaaatgaccaaacatattaataaaatatggggatgtttgtaatggtgccagagctacggccatactgtccattgctaaaaaaatcaatcctagggccattaagacacgtcctaaataagcaattttattttttaagaacattagtaataatccaaggacacataaatagattgctgactgacctaaatctaaagcaatcatgagtccagttacagtagttccgatattagcacctaaaataatccaagttgcttgatttaatgaaattagatgactattaaggagaccgatgagaataatagttgtagcagaggaactatgaattattgctgtgatggctgttccggtgataacacctaaatatttatttgaagatagtttatataaaatattttcaagcttatcgtttgctaaggtatcaaggctagttgacattagatgcatactataaagaaaaacaccgagactagcaataaaaccaattatatttttagtaataaaatcactcccttattattattaattatattaataaatcgataaataatgtttgttttcaagataatcattaaatgttacaatgagtgaaaggatgtgatattgatgaattatagtgcgattattttatgtgctggaaaaggaagccggagtggactggattataataaaatgttatatcgttttggtgatcaaactgtgtatcaaatgacgatgaaaacttttttaaatgatccgcgctgtaagcagcttgttgtagttacaaaagcggatgagataactgatttaaaacagttagtgacagataagagaattgtttatgtttatggaggtaaagagcgtcaagatagtgtttataatggcctgcaggtagttgaccaggatcatgtattaatccatgatggagctagaccatatataacgacagaaaaaatagatgatttattattatgtttaaaagaatatgatgcctgtttattgatggtaccagttaaagatacgatcaaactttgttgtgatgatactgttgaggtgactttgccgagggcaagattgatgcaagctcaaactccgcaagcctttaaaacgagtttaattaaagtttgttatcaacaggctcaagatagtgggtttattgctactgatgatgcctcattggttgaagagtttagtacagctccagtcaaagttgtaataggcagttatgagaatattaaaataactactcctgaggatctttaaatgaaggaaagaaataataattttattactcataaaatcattataatcattgttttattaggattgatcatgggggcgttagtttatcagttgcgcttagcaggggaaggcgaaactacgataacagctaaagagttaaagggacagatagttgatataacacatgaaacaatcagtttgcgtgatgataataatattgtttatacggtggattgtcaaaaggccaaaataaaaggtgatgagttacagtatgggaacttagtaactatcaaatatacgggtaaactcgagcaaacaaccgcgatacaagcaattgatgttttaggcttaaatgttcaagcggttcaagttagaaatggtggaactggtaatacggatgctacgatagcttcgcataagattgcagtaatggttgaaaagatgacgttagagcagaaaatagcacaattatttttagctcggtgtcctgaaagtcaagcagttgagttgttgtcacaatatcaattaggtggctatatgttatataatcgtgattttcataatcggacccgtgaggaagtaattgaaaatattcagtcatatcaaaaagcagttactatcccgatgttgattgcagtagatgaagagggcggaactgtagtacgggttagtaataatttacgcagtaacaaatttcgttctccccaagatgtttttaaagcaggcgggatggacgctattattagtgatgctacagaaaagtcggagtttttaaaagaatttggaattaatgtaaatataggtccggtagctgatgttgcaatgagtaaagatgattttatctatcaacgttcatttggaactgatcctaatgaaacagctgaatttgtgaaaaatgtcgtaaaggcaatgaatgatattaagatgggaagtgttttaaaacattttcccggatatgggaacgttgctgataatcatactgctatatgccatgattcacgtgattatgattcgcttgtcaataatgatttcttaccatttaaagctggaatatctgcaggtgcaaatagtattttgattagtcacatagtagttgatagtattgatgatcaaaatctagcatcattgtcacctagagtgagtaagattttacgagatgacttaaattatcatggcgttattattgctgatgatatttcaatggctagtgcaaaagcctttggaagtgaaggtgaagttgcgcttaaagcgattaaggcagggaatgatttaattatgacttctaatcctcaagaacatatctcggcacttattacagcagctaagaatgatgaaatatgtctcaattcgttggatcgttctgtaatgcgaatcttaacttggaaaagtcagttagggatactgtaaaatatgatgatttaatcaaataaatcattgctttgttttgattggtgtgctattataattgagcatgtaaaaatattatatttactgcctgcttatccaaagagataagccaatagaccataggaggtatagaaatgaacaagtatgaaattatgtttattgtaaaacctgacgttgaagatgacgctagaaacgctttaatcgaaagctttaaaggaattttaactgctaacggtggaactgttgataacgttgacgaatggggattacgcgatttagcttatgaaatcaaagattacaaaaaagggtactatgtagttgttgatgctacttgtacagctgctgatgttgctgaatttgaacgattatcaaacatcaatgcatctatgttacgtcatttaactcttcgcaaatagaaggaggcgtactagatgattaatagagtagtcctagtaggacgaatgactagagatcctgaacttagaagaacaccacaaggtgatgcggttacttcttttactttagcggtaaatcgtaattttacaagcagagatggtcaacaacaagcagattttattaattgtgttgtgtggcgtaaacctgctgaaaatgttgagagatattgttctaagggaagtttagttggtgttgaaggaagaattcaaacacgtagctatgacaacactcaaggtcaaaaggtatatgttgtagaagttatttgtgatagtgtgcaattcttagaaacaagagctgctcgtgaaaggcaaccacagccacaacaacaaatgcaacaaccgtaccaacaaccacaaaataatgataatttctatgatatgaaaacagttgaattagaaaaagaatttgataattcaattaatacatatgatatcatggaagatgatattcagttttaaagaaaggagttttcaaaatggcatttagaaaacaaagaatgggtagaaaaaaagtttgctacttcactaaaaacaaaattacttacatcgattacaaagatgttgaattattaaaaagattcgtttcagctaacgggaaaattatcccaagacgtgtaactggtactagcgctaaatatcaaagaatgttagctacagctatcaaacgtgctcgtcaaatggctttattaccatacgttggtgaataattgaaatttaaacccttgatgaattcaagggtttttctttttttctaaaagatttgacatcaaaaaatcttttaaatagaaataataggtgtaaatatagtgatttatggatgagaaaccattaaaaatcaataaaataagtgttatcatacgttggtgaataattttgactaataaaccttgattaaatcaaggtttatttatagaacagtttgatttagcaaatcttagatattgtttaaagttatagttaacaaatcatataattttataaaaagtaattatataatgaaaaagattatcttttgaaaataattgaataaaaatggcatttaagtataatgaaaagaagaggtgagtatgatgattgcaagtgagaggtttttaagaatagtaaatacagttaatgaacgtgggtttatttcaacaaaagaactttctgaaaacttagatgtaacagaaacaacgataagaagagattgtgaagaacttgaaaaacaaggactgctgataagggttcatggcggagcaaaaagtattgagcaaaaaacaattctttcaaataaagatgaaaaacaaatgagcgaaagaattactaataataaagagaaagatttagtatgtaaaaaagcagcatcatttatcagggatggagattgtatatttttagatggtggaacaagtattgtaccgatgctaaaatatataaaaggaaaaaatgttaaaatagtaacacatagtaccttgattgcaaatggatttaatgattttgaatctgaattatttatgattggtggtaaatatattccagaatacaatatgtcagttggtccaattactttaagtgacttagaaaagtttaattttgattatgctttcttaagttgtgccgggatagatatagatagaaaattagtctatacagctgaaatggatacaatggcagtaaaacaaaaagcaatggacttagcagtaaagaagtatttattaattgattcatcaaagttaagtgttaaaggtttttgtagctttattagcagtgatgattttgatgcagttatctgtaataaggatgctcatatgaatattgatgatatcccagtaaattatattttaacaaatgaagattaaataaagacatattgaactagtttgtttgatatgtttttttatacaaaaaaacaaaaacgaacaaaaataaacaaatatatgtttacaaatgtttgtttatgtgttattttttaattaaggaggaaagataacgaacaaaaacaaacaaaaataaatagttatctattagaaaaatgaaaaaaataacaaaaaaggcaaatgaaatgaatttaaaggagttagcatcttatattgactattcagttttaaaaccagaatttactgaacaggaaattatcgatctaacaaaagatggagtaaagttaaattgtgcaactatttgcattaatcctggttatatggatttatgtgagccttatgttaaaggaacagacacaatgctatgtccagtatgtgattttccatttggaacaagctcaacagaatctaaagttaaacaaattgaaattgtggctaaatacgattcggttaaagaaattgatatagtcgctaactttggaatgatcaaaagtggaaagtgggaagaagttttagcggatattaaagcctgtaccgaagcggcccataaatatggaagagaaattaaagttatttttgagactgatgctttaaatgagttacaaataagaaaaatgtgtcatatttgtatagaagcgggtgctgattttgttaaaacaagtactggatttttaacgggacatgaagctcatggagcgagtttggaaataatcaaagtaatgatggaagaatgtggtgataaaattaagattaaaggaagtggatgtattcgaacaagagaacattttttacaattgattgatatgggaattgatcgtatgggagttggatatagatcagtatctgttgtgttagggttagactagctaatcaaaagtgtttacaaaagctaagaagagaagggggcggtgtaaacgatgttaaataaaaaggctaatgaagctagaaaaagtattattaaaatgatatatgaagctaaatctggacatccaggtggatctttatcttgtattgatattttaatgtacttgtaccaaaaggaattaaagctaactaaagataatattaattctaatgaaagaaataagctggtactatctaaaggtcatggggcaccagctttatatgctgtattaaaagaaatgaaagtgttagatgaaaaagagttaatgacttttagaaaaattaattcttctttacaggggcatccaaatatgaatgatacgaaaggtgtagatatgtcaacgggatcattagggcaggggataagtgcagctgttggaatcactttggcaaataagtacaaaaataataattattatacttatgtaatttgtggtgatggagaatttgaagagggacaagtatatgaggctctaatggcagcaagtcattatcaacttagtcattttattctttttcttgactataatggattacaaattgatggaaaaatagtcgatgttattgggccacaacctttcttggaaaagttcttagcttttggttttgaagttatcaatataaacggtcatgattttgatgaaattgaagcagctgtggagatggcaaaaaatagtcaaaaacctactgcaatcattgctcatacagtaaaaggaaaaggaatttcatttatggaaaatgagattgaatggcatggaaaggctccaaatcgtaaagaaatggaacaagctctgagggagttaggaggtcattaggatgaagattgcaacaagagaggcctttggagaagcactaaaagagctagtgataaaaaataacgatgttattgttttggatgcggatttatcgcccgcaacaaaaacatgttatgctaaggaagcaagaccacagcaattttatagcacaggaattgctgaagcaaatatggtcggaataggtgcaggtttggcggttcaggggttaaagccttttgtaagttcatttgccatgtttttagcagggcgtgcttttgaacaaattagaaattctattgcttacccacatttaaatgtaaaactttgtgcaactcatgccggcttgactgttggcgaagatggagcaactcatcaatgtaatgaagatattgctttaatgcgagttttgccgggcatggtagttttgcaaccgtgtgacgcaaatgaaacaaaagctatgatgcagtttatggttgactatgatggtcctgtatatttaagaacgagcagatatgcagtggataatattttggactctaattataaatttcttttaggcgaaatcgttccaattgttaaaggttgtaaaattgcttttttagcgactggtattatggtaaatgaggctaggaaagctattgaaattttagctaaaaataatatatacccgtcattatacaatgtgtcctcacttaaaccaataaatacgatgcaactaaattcaattataaatagttatgatcttatctttacattggaagaacacaatattataggtggtttgtatagtttagtttgtgagaagttggataagcctaaaaagatatatccaattgctatccaagatacatttggtgaaagtggaacaccagaggaattaatgagtaaatataagattgatgcagattacctagtaaagtctgtattagaaacagtggaggaataaaaatgacaaagtttaaagatgattttttatggggtggcagtttagcagctaatcaatgcgaaggtgcttttgatgcagatggaagaggtctagatttaatggatgtaattccgggcggattagaagcaaggcaggcagcatatgtttcaccacttgattatatgaatgaaaatattgagtattgtccaaatagaattgcaatcgatttttaccatcgttacaaagaggatattgctttgtttggagagatgggtttcaaatgtttacgtttgtcagttaactggacgcgtttatttccgtatggagatgaagaacaaccaaatgaaaaaggcctaacatactatgatagtttaatagatgaattacttaaacatggaattcaacctttaataacacttaatcattttaatgtaccgttgtatttagcaaagcattatggtggctgggctaatcgaaaaatgatcgatttctactgccgactagtccgtctgttaatgacccgttataaaggaaaggtaacaaaatggttaactttttgtgaaattaatgttggtttatttcagccctattcaaccctaggtttattatatagaaaaggtgataatattgaacaaattaagtatcaggcaatgcatcatcagttactcgcttcagcattagcaacaaaaataggacatgagattgataaaaataatcaagttggatgtatgattgcaggtggggtcgtctatccgtatacttgtcacccatcagatgtattaaaagcttttgaggaaaataataaggaactaatgttgacagatgttcaagtttttggagaatatccatatcatatgaaagctaaaatgaaaaaagaaggaatcactatacatatggaaaaagatgatgaggagattctaaaaaataatacagttgactttgttgctttcagttattatgcaagtaaagtagtaacgacagatcacagattaaagatcaataactatggcaagttacaaaatccttattgtgatgcatcacaatggggatggatcattgatcctcaaggaataagaattacattgaatttcttacaagaaagatttcataaaccattatttattgttgaaaatggtttaggagcacctgatgttgtagaaacagatggctcaattaaagatgattatagaatagaatatttaaaagctcatattgaacaagtaaaactagcactagatgatggaattgatttgatgggttacttaacctggggcccaatagatgtaatttcagcaactgaaggtcaaatgacaaaacgttatgggtttatatatgttgatcgagatgatgaaggaaagggaacattaaaaagatcaaagaaaaaatcatttaactggtataaaaaagttattcaatcaaatggtgaggaattagaaaatatttaaagaagataaggggatgaagatcatgtcgagaaaatgtataatcggacaatctggtgggccgacagtagttattaatgcaacattagccggggtcattcaaggagctttgaaagcagattatgagaaaatatatggaatgattaatggaatagatggattgttagatgaaaagatggttgatttaagtagttttaaagatcagaagaatttgtttaagttgattcatacaccagcaatgtatttaggctcatgtagatataagattttcgaaaaggatcaatcaattaagcaaagaataattacaatattaaataagtatgaaattactgacttcttttatattggtggtaatgattcaatggatactattgaaaaattaagtacttatgcaaaaatatgtaattgcccaatcaactttattggtattcctaaaacaattgacaatgatcttatgaatattgattatacaccaggatacccttctgcctgtcattatgttgctacctcattatgtgaaattgcttttgacagtgttatatatccaataaaatcagtaacgatcgtagaaattatggggcgagatgctggctggttaacagcttcagcacaacttgttaatgaagtctatcctgattctatcgatttaatttatatgccggaaaacatttttgatgaaaatgactttcttgaacagatcaaagataaattaaaaaagaaggatcactgtattattgctgtatctgaaggtattcgagatcaatatggaatgtgtgtatcactagatagtgggattcaaaaagatgcatttggccatttatcaaataatggctgttcaaattatctaaaaaaacttatcggtgaccatcttggctgtaaagtacgggccattcagttaagtacccttcagcgttgtgcagcacatttagccagttacatagacatagaaaatgctttacgtattggtagttatgcaataaattgtgcgttggataaacgaacggggattatggtcacaatttcaaaaaatagaaatgaatttttattaagtcacgttgatattcataaagtagcaaatcatgttaaaccatttccattagaatggattgatgaaaagaataagaagattaaaaaagaatatattgattatgtggttcctttaatatataaaagtggacaaattgagcttcctcaatatttgcaattaaatgaaagatagtcaggcttttaatcttcttaatcagtttttagcgataaatacatatgatgaaaagaaaaagtatgatctgattttagtattaggaaatgctattgctgaaactggattaatagcttatcaactatacaaaacagggcatgcttatcacttcatgattgctggaggaaaaggtcatactacagatattttaatcaatacgattaaagagaagtatgatattaaagatattactaaaagaagtgaagcagaattatttaagtatcttattgaagaaaattatggggtagacaatactattttattagaaaaagaatctactaattgtggggaaaatattcagtttgctttcaaacttctcaaaaaagaagacattatagtaaaaaatattttattggttcatgatcctcttatgcaaaggcgaatcgatgcaactgcaagacattatgctccacatataaattttgataattatagatgttttttgccagttgttgagaatattggatttgaacttaaaaataatatttggggcttatggtcaaaagaacgatatatttcacttttattaggagaaatgaagagagtcatcgatgataaagatggctatggaccaaatggtaagcagtatattgaacatgttgaagttcctcaaaagatactggcggcatatagatatatcttttttcgatatggtaaatatcaaaggaaataaaaactttatcaataatatttagacttttggtgaaacaaaagtcttttttatgatttcttaattttggaaatgaattgataaacggtgtaaacaatattattgtgtaaatataaattaaaaggaggaaagaagatatgaaaaaggcagcagttattgtagctccagggtttgaagaaggggagacgttatctattatagatattattcgtcgtgctaattttcaatgcgatatgattggttttgaaaaggatgttgcaggagcacatgatattattgtgaaatgtgacagcgtactaaatgatgaggtaattgattatgatatgattattttaccaggagggtatcccggtgctgctaacttaagagataatacaaggttaattgaaattttaaatataatggcacaaaaaaacaagtatatttgtgccatatgtgcagctccgattgttttagaaaaggcgggattactaaaaggaaaaaactatactgcttatgtgggatacgagcaaaaaataaaacaaggaaattacttatatgataaagtggtgattgatgggaaaattgtaacgagtcgcggtccagcaacagtttatgcatttgcatataagctggtagatttattgggtggcaattcactagctctcaaaaaaagaatggtctattttaatgcttttgatgttaaggaggatgaatagtatgagaaaagctgcagtattggtagtagatggatacgaagaaagtgaaacagtgacgattgtagacttgttaagaagagccggaattgagtgtcatacatttggtttttctgaacagtacgttagggggatgcaggggatgatgataaaagtagataagatttttagtgatgagatcaaaaattatgatatgctggttttacctggcggaagaccagggggtgtgaatttaggagcaaatccactggttattgaaatggttcaatactataatgaaaatggaaagtatttagcagcaatatgttctggaacaattgttttatcaaaggcaagagttatcgacggtaaaaatgtgactggctatactggatatgccgataaattagtaggtggagaatttgttgataaggttgttgtttttgatcagaatattataacaagccaagggccagcaacatcatatccatttgcatttaagattatcgaagtgttaggtcaagatgttagtgaaatgaaggaaagactattatataactttgctggtggaagataagtgaaagtgagtgataataatgatctatgataaattaccgatagtttttttaagtacgcttgtcagcgaaaaaaatggttcaactaatagccagatagcagcatatattttgaatcaccttgaggaagttcaaaatcttggaatcaaggaaattgctaaggaatgcaatgttgcggtaagctcaatttcccgtttttgtaaagaagtaggtttaagggactttgctgaattaaaagaactgttgttgtcaacagatttatcttttgaagatcattcacacgcaacttcgaaacaagcaagactgcatgattatagtcataaagtaagagaaagtattatcatggttgaaaaatcaattgatatggatgcagtaattgatttatgtaaggatatcaatgaatatcaaaaggtagccatttttggtttgttaaaagctggagcagtagcttttaatttgcaaggtgacttattaatgctgaataaacaggtatatactaatatctcctattctcaacaaattcaatatattgttgcggctgatgaagatgatttgattataattttttcgtatacaggtgcatattttgattatcaagatttaagagctttgaaaaaaagattaacagcgcctaaaatatggatgatatcgagtgatgacagagagtatcctgaatgtattgatcgaacaattttatttaaatcgttacaagatcaaaacagtcatccttatcaattacaatttattgccggactaattgctcaagaatattcacgtttgcatcagcttaaataataggaaagaatgacttttgttaaaagtcattctttttcattttgttcattttcttgaataattaaattagtaatttctcgtgattccgtatttttagcgagttcagttttaaaagtataatgctgatcataggctgttgtaaaaaagcaagaatataatacatctaaaataagtgagatggattctagtgaagaataagcaccaatttttgaatatgatttttctcttgttgtaacccgtaaaacaatatcagctaatcgagttaaattattttcaccaatacttgttattgcgataatagggacattctttttctttaaaatattagcaattttaataatttcaccagattctccagaatatgaaagacaaattcctaaatcattagaattggccatcattgcttcttgatagatattgctatttaacacaaaaacttcagcatttttaccgatgtggcgtaatttaaaaacaaattcttcagctggaaatgataaattagaaacaccaaaaactttaacagtattacttttttgtaatgctctcactgctttttgcagtgtatcgtgatgaattaatgaaagggtatcattaagactttcagtttttaactgtgttattttgttagcgatattcataattgaatctgtttttaaaaaaggttgattggcatctatatttaaatgacttttgtgcaaatattgaacttcttctaaaaaggcgtttttaaaattattataaccactgaatcctaattttttagaaattctaaccaatagcgatggtgaagtatatgtttcaccagcaatcatcgttgtcgaataatcttttattcgctcttgttttgttaagataaaatcaataactatttcttcacttggagaaaattttgtgtttttcattttttcttgtaatagcattgctcgccctcctggtattatcgtttctattatattctatcataacaaatatgataagcaatggattaagcaaagcggtttgtaaaaggcttttacaaatgatacttgtatttataaagataaatgagaaagcttttctaaaaggataaaactagctttaatgtcatctttatttgaattaagataggtttatcaaaaggaggaagatttatgaaagtagttgttattggggcatgtggacatatcggttcatatttagtgcctaaattagtgaagggagggtttaaagttgtagcaattagtcggggtaaaagtaagccatacataaatgatcctgcttggaagatggtagaacaagtagttttagatcgtaataaagatgaagactttgcttataaagttgctaaaatgaatgctgatattgttgtagacttaatcaactttaatatcgaagatacgaaaaaaatggttacagcattgaaggaaattaagatatttcattatttatattgttcatcgatttgggctcatggtcgagcagaatttttaccagctgatccaaatagtttaaaagagcctttggatgattatggagttgataaatatcaaagtgagttgtatttaaaagaacagtatcgcaaaaatggttttccagcaacgataattatgccaggtcaaatttctggaccaggctggacaattattaatcctcttgggaatacagacttttcagtatttcaaaaaattgcaaatgggcaggaaatctatttaccaaatttaggtatggaaactttacatcatgtccatggtgatgatgttgcgcaaatgttttatcaggcaatcactcatagaaatcaagcattaggagagagttttcatgcggttgaaagagaatcaatgactttatatgggtatgctaaagcaatgtaccgttattttaatcaagagcctaaaattaaatttttgtcatgggaaaaatggtgtaaatatgttaatgatgatgaattaatagatcatacttattatcatattgcaagaagtggggaatatagtattgaaaatgcacaaaaattgttagaatattcacctaaatatacaaccttagaaacagtggaacaagcagtagccagctatattgaaagagggattattaccttataattaagaataaatataaataaaaagagcataatgattttatagaataaaaggagcgtacaaataatgattgaaccagatactataaaattattacgagaatgtgatgcagggattaagatgggtgcagcttcaatcgatgatgttttagattatgcacatgatgaaacgttaagacagcatttaattgactgcaaaagagaacatgagcagttaaaagaagagattcaaactcttttagataagtttcatgatgaaggcaaagaacctaatccaatggctaaaggcatgtcttgggtcaagacaaatgctaaattggttatgcatgaatctgatcaaacgattgccgatctaataactgatggatgcaatatgggagtaaaatctcttaataaatatcttaatcaatatgaagcagctgatgaaaaaacgaaagatattacaaaaagattaattaatcttgaggaaaaattagtaattgatattcggcagtttttataaatagcaaaaagccttttacatatagtaaatggctttttttattgttgaacttaatttaaaagatagatcgaaagatttaaataaccagcaaaagttacccaaataagatatgggagcattagatagccagctaatttatttgttttgtaaaataggattgctgttattaagataagcagccataaaattattagccaaataaaggcaagtaagtacaacctaagattaaagaagataataggccaaataaaattgaaaaaaagctgaatcttataaatgaaaagagttacatgctgagaagactctgtagtcaagactagataggatgctattcccattaaaatatatagaacagtccaaacgattggaaatagccatcccggtggtgatagcactggcttttgaattgtttcaaatgtggtcatagcatcgtgtgtaagaaatgctgaaagagtacctacaaaaaggggaataataatacatataattaatttctgccattgaatttttataaaatcacctcatcaaaaatatatgaaaaaaataaaattatatgcttgttgataaaatttagggtataatatcctgagaaaaagagttttagagaaaaggtgattgtagattactgaggttgtggtaaaataattatgtgatgagctagatataaggaggaataatcatggcattatttgatgatctaagtaaaaaagcagcaaaactgacagaaaaaacaattgaaaaatcatctgaattagcggatgtcgcgaaaacgagagtgagtataaaaagtgctcaggctgatttagatgagaagtttattgaattaggcaaactgtattatgaaattattagtaatgataatatttttgatgaaaagacagcagcaatcgttcaggaaattgacagtattaatacacgaataaaagaattagaagcaaatttggataaataaaacctgttgaggatcatacttcaacaggtttttcatattctttttcaatatcatgccaaaattcagcgtttttaattcctaaattatcagggtggaaaattggatcttttccttcctttttttgaatactatagtcttttaaacatttaaaagcaattttacctaacaataaaattacgacaatattcatgattgccataaagcccatcaaaacatcagctagatcccaaatagtattaaaactagcttgggcaccaaagaaaattataattacagtaataattctaaaaataaataaagcttttttgttgtcaataataaatttaaaattactttcagcatagcaatagtttccaatcaaagaagaaaaagcaaataagaaaatagaaattgttataaaatgaataccaaattcacctacttcagcaaaaatagcttgttgaacatacggcattcctgttaatccagattctgtcccataatttagtaacataaaagcagtagtggaacaaattaacatagtatcaataaaaacagagatggtttgtactaaaccttgttttacaggatgagaaacatctgcggttgctccagcgttcggtgcggatcccattccagcttcgttagaaaaaagcccacgtttgattccatgcattacacaagagccggcaaatcctcctgcaatcgctttaaaatcaaatgcttgattaaaaatatcactaaatatttctggtagctgattaagattgctaaaggttatgtataaaccaagtaatatatataaaatagccatgactggtacaactttggagctaatgatcccgattcgatggactccgccaaaaataaccgcagcagtagctaaagctaaaactgcaccaataacaaaggcaactaattcattgtttgaaaaataatattcgacggcactactaacattatatgcttgcaatggattaaagccaaaaataaagcaagcaatcaacagacacgaaaaaataattcctaaccagcgctttccgatagctttttcaatataataagctggtcctccacgaaatgagtcgccgtctttttctttatagacttgggctaaggttgattcaataaaagcactggctccaccaatcagagcaattatccacatccaaaaaatagaaccagctccaccagcagccaaagctgtagcaacaccagcaatattaccagttcctactcgtgatgcagttgaaatcattagtgcttgaaaagatgaaacaccatcatcatgatgtgatttttccttaagaagtcgaattccttctggtaacattctaaattgaacaaatttagttcgaattgtaaaatacaccccggttgcaacaagcagagcaattaaaatattgctatataaaaattcattgattaatccaagtaattcttgaattgatatcacgcattcacttcctttcattaattaatcttgattataaagcgcaaaaatgcattataatcatacttttgtatgttaccatgtttgatttctactgtaaataagaatgcacaaaaagtgtatccattaggatacacttttagacaaattattgatgatacttatcctcaaattcttgtaaaggaattggtttagaataataaaacccttgaataatattgcagcctaaacaaaccaacagttctatttgtttttcagtttcaactccttcagcgacacaggcaacattaatttttttacacatttcaattatatgatgtaagatagtttgacatttatcgttatttactaatgtgtcgatcattgatttatcaatttttaattcatcaaaatttaaagttgataataatgacatatttgcatatttagcaccgaagtcatctagtgaaatattaaaaccgagatctttaatgcgtttagaaatcgtagcaatgatactacgatcgatatttccaatgctttcagtaatttcaagagttatgaaattgttaggaatattatacttatttttaattcgttttaaggaattagtaaagtcagattctagaagggtaaggcgagaaatattgacagaaataggaattaattcttttccttctttttgccaacgctcaagaatttcacaaatttgttcaaacatataaaaatctaagtaacgagtcattcgttctttttctaatgtgggaataaatttatttggcatgattaagccgtgaccgggatattcaagtcggaccaaagcttcggccgaaacaactttgttttgatcaatatcaaattttggctgtaagtaaacaacaaattgttttgctttaaaacatttgagaagattttcaagttttttaggtgaatagtgttttttatatgtatcagctcgttcatagtatatttgtttgttgatcatcattaattcttcggcttggtgaatcaaatcattaatatccatgttatcttcactccatgtgtatccaagtgagacaccatttggagttgaaccgagtaaagtatcttccatctgcttagtagcttcaataaattgtttatactcaagattgtttacaataatgatgaattcatcaccacttaatctaaagattttttcgcttgggaaatatgaattcataatactagaaataatcgtaattattttatcaccatggtaatgtccaaaatcgcgattaatttctttcaagccgttgatatctgcaagaatgactccttgagagtaaacagcactattttcataactcaaaaattgagtaaaactattacgattaagtaagccgcttaagttatcgtgataaagattgtactgtgttttttcatataatcgacgtttctttatctcgttgacgatagaaaaattgatagaatcaagtaatgcaattgtattttggttaattgaaggattgtcaacaccaatatagcctgcaaaaatgccagtttcctcatagggaattgtcactaaagaatgggcttcacgactaataaagtgtgcatattctcgaggatgctcttttttgatggcttcacaatcattgataattagattattatgatgttcaaaagcttcataaatataaggaatttcatttaaatcaatccgctgtagttggtcacgatagtgaggatagttttctcggcaccattcataagtgtttgaaccaatttttgtatttaggtcaatttcaacgatatatgctcttgttgcttggtaaaaattgccaatgatctctaaaacgttgttaatagcttcttcaagagtgtccggaattgtcaaggcttgaagacaatctaaaatcgttttttcaattgcaaattcagtaggaacacgttgaagattgaagttatgagtatcagaaacatcaacagcaatttccatccgcacaggtgttccttcccataatactaatttatctttaacaatatagtctttatttagatgctgattgctaaactcccaaatataaaattcattaagatttaatttagcattagtacaaaatgggcaggggctagttcgaccttgtagagcttcgtaacatttaatatgattatattctcccgcttcaattccggtgatttcacgtccctttcgatttaagtatagtaattcataagtatctaggctgctaacataaacaatttcatcaagttcatcaattagccagcctttactaatataattagttacaggagttatatcctgatagctatcattaaaagcaaaatattgcgatttgcccagtttttttgctcgatagagagcagaatcggtttgttcaaacaattcgtgtaatgttttaccgtcatcagggctaaaagtaataccaattgaactgctgatcgtatattcttgataatttgatgagtaataaagatgaagttcttcaagaatgatactagctttatggtaaacatatttcttggagggaatatctttaatgaaaataatgaattcatcgccgccataacgcccaataattgctttgttattaaaaatatttgttagcttatgagcaatctcacataaaacggtatccccaaaactatgaccaagattatcgttgatatttttaaagttatcaatatcaatcaataataaagcactactatactctctttttttatttaaatattcattaacaatttgaccaaaagcggttcgattgtatagtttagtgagcggatcggattgagattggcgcaataattctaattcatgtattttcttatcattaatatcttttacatagacaaagccaaataatttatttgtttcaccaacgtgtaagagatgaatcgttgtactgacccagccttgtttttgagttgcattgagcgaacgatattcacaatatacttccgtaatcccctgttcaaataatttctttaaacggtgaggatgtaattcttggtagaatttatttttatcatcaggatggacgcattttttagtccagcgaagtaaaaactcactataactacagttagtgtttaagtcaactagttttaacatgttaacggtattttcgataatatcttcgataattaaatcatcatcaatattaatttcataggatactaaagcatctgatgctattgctgctttaaactgtccctcatgaagatatttttgatgactgatttctagattttttaaaacttttttgttttcagtaatattttcgactaaacaaattatatatactgactgattattgtatataaaggatagtctagaacgagtccaaatcaagtcattatctttattaaatgattgagtctcaatttcgagaaattcttctttcttttgaatgatactagtaattgtattttttactttttgataatcattagaatagggaagagaatagttgaagccgtcattacgcttgtatttaaaaagttgataataaagatcattagcatattcaaaatgaaaattatgacgatatgtaatgattgcacaagcagtatttaaatggttacagatcttagtgatcatatcaagattatatggattaactggcattctattttcctccttattaaattagaaaaaatagctctacctcattatactactaaagcaattatatcggttgaattattttaatgtttgattaatattccagcaatgatctaatggtccactgccatgacctaggttaagattagcttttaaagccccggtaatatagactttagctctagtaacgctttcttcaattgaatattctaaagctagattggaagcaattgctgaagaaagggtacagccagtgccatgagtattaggattattaattttttctcctgtcaaccaagtaatatttccccggtaataaagaaggtcatcagcccgttcttcaaaatggccccctttgatcaaaatgtagccgtggtaccattcactaatcatctttgcggctgtaatcatgtcatctttagtattaatttttaaatttgttaaaacctgtgcttcagggatattaggggtaataatagtagctaatggaataagcttttctttcaagagtcttagagcattgtcagctaataaacgagatccgctagtagaaaccataacaggatcaacaacgataggacaatctttttgtgatgttaatttatttacgatcatttcaattaatactggactggaaaccattccaattttaattgcatcaggataaatatcttcaaagacacagtcaaactgttcggctaaaaaatcaggttttacttccataatatctctaacacctaatgtgttttgggccactaaggcagtaataatactcatcccgtagactttatgagctgtcatggtttttagatccgcttgaactcctgctccacctgttggatcagttcctgcgatagttagaacttttttcataatcatatctccatttctgataaattttttaaatttaaatcacttattttgcaaatttcatcccaatcatcttgattattttgatctgcaacggcccatactgtaaaaccttgcttttttgcagcaattattgcatgaagggcatcttcaataacaatgcattcatctttatggaggtgtaatgcagagattgcataattgtaggcctcgccactgcgtttatctaaagtagtatgatcacatgtaataatttcatcaaattttgatgttagattatatttatcaagaatgttaattgttgcttgataattatttgcagttaataagcacagttttttatgatggttaaaacagttagtaataaattccaaagcccctggttttaaggggatttcgcttaaataaatatgatttaataaactattaacttcattgattaaaacatcaagaggctcttttaattgatatgtctcagcgatgtatttaattgcttggttaattgatagtggtgccaagatatctttaagatttgcctcaggggtaattccttttaattcgagaaaacgactgcctaattcattccaaatgtgcatcgaatcaagcaaagttccatccatgtcaatgatataacctttaatcatagattcctcgggcatgtgcttttaatttagcggctgcttcttttatatcaggagcgctcataatggctgaaacaacagcaataccatcaatttttgttccttttaagagtaggcaattgtcttggttgataccaccgattgctacaacaggtaagccaatttttgtagttatttcatgtaattgggtaaagctcactgctgtagcatcatctttagttgaagtattgaacatggcccccactcctaaataatcagcaccatcttccttggcggcaagagcttcttttaagttgtgagcagaaaccccaataattttatgaggaccgattatttttcgaactcttttaacaggctgatcatcttgaccgatatgaattccatcactgtctacagccaatgctacggctacattatcgttgatgataaagggaatatggtatttagaacaaattgttttgactttttttgcttgaatagtaaattcttcatcagttaaatttttttcgcgtaattgaaccattgttactccacctaaaatagcttgttcaatatcttcttcaagtgaacgatcgttcaaccagctgcggtcgctgactaaatatagttctagcatgtttctagtgaagttcaattttaacaccggctttcaattgataataattaattgtactcaaggcatcgattaaatgcattctaaaactgcttgttccactattgtcattacgaactctttgatcagctaactcaccacagtatcccatcattgcaatcgtataagcagtagtttctaaaagatcattttgaccaatagcggttgttgctccaagaattgccgataacatacaacctgttcctgtgattcgtgacatcattgcacaaccgttagtgattacataggttttttcttgattggcaacaatatcaattgctccagtgattgcgattacggcaccggtttcttgactaaatttcttagcaaaactaataacttcattaagattttcagctgttacaatatcattgatattggcatcgactccttgagttgaagtcatattcattgctagggcttttatttcggaaatatttcctcgaataacactaaaattaatttcttcaagtagtttttttgcagtattagtccgaagtttgctagctccagcaccaacaggatcgagaacaacagggtgatttaaatggttagccatttttcctgctttgatcattgaagcaactgtcctttcattcagcgtaccaatattgattactaaagcattacagattgttgtaatttcctcaacttcatgaatgtcatcagccataatggggctgccattaacagctaagatggcattagcacaatcattgacagtaacatagttagtaatgcaatgcacaattggattgcgtaatttaatttcttctaaaactttttcaaacatattcttcctcactttcttaaagcactaaaaagagaatatgccaagtgccatattccctacttattgttagtgagtatgtccctacgttggcattatccaaatcaggttagcggtcgaagttcacaacttcctctcagcctgtttacaagctcccgtgctttaactatatcatagcattttcaaactatttcagcaaactaagtatcaaaatttttttgcgttgataataaaagaagattgaaatgcataattatatcgagtataattagtagggttagcgttaaaacccagaacggagcgataaaatgaaaaataattatgatgttgtggttgttggagcgggaccagcaggaatcatggcctgctatgaactgtatttgaaacagccggaattgaacgtattgcttatagataaaggtcaggatgttatgaaacgtcactgtccgatcaaggaaaagaagatcaagtcctgtccaatcatcaggaacaatgaaccgggctgtcttcctgcctgttcgattacagccggatttggcggtgccggtgcctattctgacggtaaattcaatattaccagtgaatttggcggctggctgactgactatctttcaaccaatgaggttgaagatgtaatcaactatgttgacaatctttatttaaaacacggagcaaccagagaaataacggatcctacgactgacaaggtcaaagaaattgaacatcgaggctatgcagtaggattaaaactgctgcgggccaaggtaagacatttaggaacagaagagaatctgcggatcatgacagaaatgtcaacggaactgaaagaacatattgatatggcatttagaacagctgtaaaggaagtactggttgaagacggacatgctgtcggggtagttctggaaaatgatgaggtcatcaaagcgaagaagatcgtactggcaccgggacgagacggttctgcctggctgacaaaagtactgaaacagcatggactggagctttataataatcaggtcgatataggagtgcgggtagagaccagcaatatcgtaatggaagagatcaacagcaatctgtatgaaggtaaatttgtctataatacaagtgtcggaacaaaagtaagaacattctgttcaaatccgtcagggcatgtagtaatagagaatcacagcgggacgatgctggcgaacggacatgcctatcatgatccgaagctggggagcaagaataccaactttgcgctgctggtatcccataccttcagcgagccgttcaatgaaccgaatgaatttgcacatgaggtgagcagactggcgaacaagctgtcaaacggatcagtcatggtgcaaagatatggagatatcaagaaagggagaagaacgacttacaagcgtttgaaagaagggtatacagagccgaccttagcagaggcggtaccgggagatctggggctggtattaccgtacaacacgatgaaatcaattatcgagatgattgaggcactggataatgtaacaccggggatagcgaatgagcatacgttgctgtatggagtggaagcgaaattctattcagcgcggccaaaggtaagagaagggtttgaatgtgaaatagatgatctgtatgtagcaggtgatggagccggattaacaagagggctggctcaggcaggagcaaacggaatcatcgtagcacgtcatattattgaacatcttaaatagtaaggtaaaaatcctgttttagacaggatttttctattttgacaggtgtagtatcatggtggtaaacttaataataagaccatagggaaggagaaacttaaatgaatgtttttgttacttcattattaaaaataattaataatccggatattcaagatactaattataatattgcttattatttattactgcactattatgatgtttttgaaatgacacttcaggaaattgcagatgcatgttatgtttctgtttctactctcaatcgcttttttagaatatttggatttaaaaaattttcaattattaaagatttaatgcaagtccatgcggcggcacgaataagtcagttggaggaacgttcgattcgcaaaaataatcaacaagttaatcagcttttaaaaccgctattagataacgatgattattggacagtatcagatcaaggattaataaatcagtgctgtgagatgattaaaaaatgtagccgtgttattttaatcggttcgaatgagatgatggattcattattgcgttttcaaggtgatatggtgatgatgcaaaaacttgtgattcaaaatactatttataataataattatatcgaacctcaagcggatgatttaattattttgctttcaatgacaggaagaattgcggagttaaaaccaactttgattgaacatttattagtggggaaaaacaatcttatttgtgttggctataaaaattttctttgtgaaaaagccctatttttaaaaattcctagttacctagatgagacgctagaaaatatgattttagataactattttcaaaatatagcttattgttattatggtggttattatgataataggtaaactaaacttaattttgtgtacttcttcatataatagtaatgattatcttttagcagcgtatctgatcaaaaaaagtaatcagattgaatcaatcaagatggttgatattttaaaagatacaaaagtatcaaaatcaactttattacgttttttaaaaaaattaggctataaaaactacactgacgttcaatacttgattactaaagagaaaaaacatcaagaaatatttaaagagagaattattgagaaaaatttaagagataagttagcaaaaaaacaaagacttatagtaattggtgatagttactcagttagctcactaattgtatataaacaaaagttttatgaaattgggatagatttagatattcaattatcattaaagtcatatggacagatggtagttgaaaaaaagtttactgggagtgacttaataatagtcgtatctctatataaaagtgatttggatttaatggcagaattttttagtggctatcttgaattgaaacattttattaaagaacaaaagattgatcatttatatgtaggaaagattgcgacggggaatcgtaatcttgatgagtgctatagaattgatgataacattaattttagtgaagcaatttatcagctttgtagtttgtttgagaaaatttataatttttatgctttgtaaggttcaaaatatgcccctttttattatttatcaatgattttctttattatagaaaccacgccaaataaaagcaatttcaaaatgaggctgtgataaaatattaatagaaaagagaaaaggaggctagatttatgagaagattaaaattaggaataatcagcttattatgtttatcatttatagaggctaatataacaacattgatggcagtagccagccgttaggtatatatttaccgcatgactatgatacaaataaaacttataagacaatttatcttgcacatggtggtgggggaaatgatgttgagtggatgaatatcgcttcagcaaataatattatggataatctaattgctgatggtgaagtggctgacgcaattgtggttactaaggataatacatattttaactttgaaaagggtgatagcctaaaaaatcttacagaatgcattatgctttacattgaaaagaattatagtgtttcagcaaatccccaagataaagtactagctggtctgtctagtggagctacagttacagttcaagcaatgttctatagtaatgaaacatttggctattatggtgtattttcaccgagtcgtacattagattttgttgaagaaacattaacactggaaatggttgcagcgtttcccaaagtatcacaatactatgtgagtgtaggaatttttgatacttttgttaggcggaatgtcaatgttcaaattaatgaagaattgataaaagccggagctaatgtagtttttgaatggaaaaatggagctcatgactggggtgtatggcgtagtcagttcagtgaatttgtaaaagattatttgtgggatcgtgaaacagtagtttcaactccatctaatcctgatgccgatgttgctccccaatcaaattcaacagctgctgtaaaaactagcgatagtgtcgatatgacaggattgttgatcataagcggtttatcattattaggaatttcaatacaatactattatagacatcgtaaaacacattaataaaaacttttaaataattagatataatctcgccaaagtagatagatgtgataatataatcttaccaagactatagaagtgagatttttattatggaaaaaattgaaaggtatagcaatatattttttaagttttagaaagaacaaaattaaagaaagggaatcattaataatataagactattgctaccccataaaatgctagtttatatctagtaagttaattatttttgaccgtttgacaatagatacatataaatttataacatgactttttatttccctattgacaggtaggaaatagtttagtatactctattcatactataatagtaggataaggggaagaaaaatgaattttgaactactacaacagctcagaaataattttcggaatggacgaatgtattgttttttataaatcatagataacaaacattaaggaaagaggaaaataaaatgagtaaagacaatttaagatttgaaactaaacagttacatgtaggacaagaaataactgatcctaccggagcaagagcagtgcctatttaccagacagcagcttatgtatttgataattgtgatcatgcggcagcacgttttggattaagtgatgctggtaatatttatggacgcttaactaatccaactgaagatgtttttgaacaaagaatggcagctttagaaggtggggtagcagcattagcagtagcttcaggagcggctgcagtgacttatgcgattgaaagtattacacgaagtggtgatcatattgtggcagctaaacaaatttatggggggacatataatttattagctcacacattgacaaattatggtgttaatacaacatttgttgatagtgatgatcccgagaattttaaattagcgttacaagaaaataccaaagcgatttttatagagtcattaggaaatcctaattcaagtttagttgatgttgaggcagttagtaaaattgctcatgagcatggtattccattaattattgataatacatttggaacaccatatttatttaggccaattgaacatggagcagatattgttgtgcattcagcaactaagtttattggcgggcatggaactactttaggtggtgtaattgtcgattctggaaagtttgattggcaggcttcagggaagttcccacaattaagtaaacctgatccaagttatcacggtgttatttttactgaagctgctggagctgccgcctttgtaactagaattagagcagtagtattacgtgataagggagcgactatttctccgttcaatgcttttcttttattacaaggattggagacattatcactacgagtagagcgtcatgtagaaaatgctttaaaagtggttgattatttaagtaaacatcctaaagttgcaaaagttaatcatccatcactaaataatagtccttatcatgaattatatcaacgatatttctcacatggagctggatcaatttttacttttgaaattgctggtgacgaaaatgatgctaagaaatttatagataatttagaaattttttctttattagcaaatgtagctgatgcgaaatcattagtaattcatcctgcttcaacaacgcattcacaaatgaatgaagctgaattagcggcatctggaattaaagctaacactattagattgtcaattggtttagagcatatagatgatttgttagaagatatcgaaaatgcatttgaccatgtataaaaaataaaaatacgtcaataatataactagaaattgttgttgcttaaaatttctattgaccaaaagctatcccagaggatagcttttaagttattagtggcttataatgtaattgaggtgatcattatgagtgagttaactaaaataccttatgttggtaaagcaactgctgcatcattgaatttaattggttatgaaacgatagcttctttaaaaggcgctgacccagaagaaatgtatcaaaaagaatgtgatgttagaggacaaatggtagatcgctgccaactttatatgtaccgtatggcagtatattatgcaagtagtaaaaatccagatcccaaaaagttaaaatggtggatttggaaagattgatattgacaataattggaagataagttaagattacaaagatgaataaaggcgatgaatagaggagtaattgtattttatgtgtttaagagagtctcggctggtggaatgggataacacaggatataatgaaaaaagactaggagctgtatctaggatattaaggttgattagataacgtgagccacgttacaggcaaaactattatttgatagttgttgaggttaataaggtgacttattaacgaattagggtggtaccacgatactctcgtccctttagcggatgagagttttttatattttaggaggaaaaaatggaagaaagaaagtttagcgaacaagagttagttcgccgtgaaaaattacaagagctagtagataagggaattgatccttttggacaacggtttgatgttactgcatattcaaaagaaattaaggaaacttacggtgataagacgcatgaagaattagaagaaatggctgttgaggttaaagtcgctggaagaattatgacaaagcgtcgcaaagggaaagtgtgcttcatgcatattcaagatcgagatggtcaaatccagttatatgtacgtaaggatgcagtcggtgaagatgtttatgaaattatcaaaaaaggtgatattggagatatcgttggtgtaaaaggaaccgtatttatgacaaatacaggggaatgttctattaaggttgaagagtatactcatttaactaaggctttacgtcctttaccagaaaaatatcatggattaagtgatgttgaagaacgttatagaagaagatatgttgatttaatcatgaatgaagaagctcgtaaaattgcttttgcaagaccaaaaataattcgttctattcaacattatctagataatcaaggctatgttgaggtagaaacacctgtattaaatccaattttaggtggtgccagtgcgagaccttttgttactcatcataatgctttggatatgaatttttatttacgtattgcaactgaattaggattaaagagattaattgttggtggtatggatgcggtttatgaaattggacgtttattcagaaatgaaggaatggatagaacacataatcctgaatttacaacaattgaagtttataaagcctttagtgaccttgaagggatgatggatttaactgaaggaattatttcaaatgcagctaatgaagtttgtggtacatatgagttagaatataagggaaataagatttctttagcaccaggatttaaacgtatttcaatgacagatgcaattaaagaaaaaacaggaattgattttgctgatcaattaagctttgatgatgctaagaaattagcagaagagcatcatattgaggtagaacctcattttggctatggtcatattatcaatgaattctttgaaaaatatgttgaagaaacaattattgaaccgacatttgtctatggtcatccaattgagatttcaccactggcaaagaagaatttagatgatccacgttttacacaacgttttgaattatttatctgtggtaatgaatatgctaatgcatttactgaattaaatgatccaattgatcagtatgaaagatttgctaatcagttaaaagaaaaagaattaggtaatgatgaagctaatgaaatggatttagattatgtagaagcattggaatatggattaccaccaacaggtggaatgggtatgggaattgatagacttgttatgttattaactggacaagaatcaatccgtgaggtaattttattccctcatatgaaaaataaataatcttaaaagtgaaaaaatacgataaataaagggtagttgaagtataaataggtttgaattgttcgtttttacgcctgatttacgcccaaattttaaaaagtagaaaattgacttgtaaaatggtatgcaaaattgtatgccattttttttaaataataggttataatgagtgtatagaaaaaaggtggaaaaatggaaaaaaatctagatactaatatgtatgtttattttggttctgagcattatgatagagaactatttaaaaatgttaaaaataaaaatataccaaagtttagcttgattggattttctttaaagtctaaaaatggatggagaaaatggtgtgatgataatgacatgaatagtgtaagtaaatatgattatttttgctttagaatacataacaataacttggcattggaaaacatagatgatataaaaaaacttcctcattacacaaataaggggagatatagtatagattatgaagcacttttaaaaatggattacccgatttatgcgttgcatatgaaaagcaaggtagctgaatatttgttgggaattgaatatgattgtgccttggtgttaagtgatgtttgcttaatagaaaactatagtgctaaagatacagataatcctattatctttgatgatatatgtccattaaaatataacaagcgaattcttggagaaaaagaaattctatattctgaatgtgaagttaatgataaaaactatatatattgcgaacaacctgataaacattacggttttaaatatttgattattaataaatcaaataggaaaattattgaaaaatgtggctatgatgaagatgaagtaacagatgtatttgaaaatataatataaaaaggtatattaattaatgcagtatattgctattaaaaattaacagatattgtaaaataacaaaaagtatgataaagtcctataaggatataaggatataaggatacgtgtaaatgaggaggaaaaatggacaagagtaataaatcaaatttaatgacagttacatttagagtgaaaagagagttacatgatagatataagattgcaatgataaaagaaaatactacatctactgaaagttttattagtcatgtaaaaaaacagattgaacattatgaaaaatatgagagcaaattggcagatatagataatagtgactatactaaagctaactttagaatagatagagatttatacgcagaatataaaattgtaatgataaaagaacgaactactccaacagcagattttataagatatatgatgaaagttgtagaagataataattgttaaatacagatataagcaaaaaataaactattgatactataaaaatagtttatttttttttaatatagataaggtaatacttaaaaaagtattgacttatagaaaagaatcattatactgttctttgtaaggtaataagtatagcctaaaggagtggttgtgatgaaagaaatagttgaagaaatattcatgaacgaagggaccaaaggtgttgaagattatttggattatattcctgaacatgatgaaatcatggaagaggaaagtgaattataatcataaagaaagatgctattatgtgtaaaaataaagatcctacaaactataaaagataagagagaacaaaggagtagcagagatgatgagtgttgttaaacaaggtaatgtaataaaagatattaattctctattcaaagataaaaaggaactgcttgaatatgaattcatagatagaaaaccaagcagagtatatgttttagatactgatgaggaatattccttaagttcgttactgtcagttcttgataataacgaattaaatgatactaaaaagatacgaatgattagagagaatatattggcaattcaaagttcattcgctttagaattatatattccgtttaatgcaattaaaatctatacagaatactatgtaacgaattataaagaggagaagaaatgatgatagattataaagagaatttaattaatgaaaatagcgagttaaatctgtatgacccaattacaaagttgatgaaatatagaatgttatctaatgaagaaatgatagatagagatagatgtgaatgtgcatatagagcatataaaaagttaaattggttaaatgataataacaaagatttagaacctgatacattttttagctctccgtattactatattaaagaaatgtgtagaaagtatgatatagaaaataatgataattattatgttagtgatttcaaaagatttgtaatatcagaaaaggatgaggactatttgaatatgaataataatcgtgctcaataccttagaaaagaatggttttgtttaaaatcaacaaaagagcattatcaaaagatatttactaacgaagatgtattattttatgtagagagtgctcataaaattggtgcgtttcatattatacctaaaagatttgggtatttgccaaaatgtaaatggcttttagatgatggtataagagctttgatggtgattgaagataattgggtaagcatcaaaaagagttatggaaatatatcatttgaagagtataaaagaaagtttatgttagaagatgtttattataatagaaaattgagaaaagaactaatgattgattttaatatgacatgggaagaactgtttgaaacattgaagaaattagcgatagtgattaataatagaactgaatcgattattcgaagattagaagaaatgtaagatgaggtattcttattatgaaaatatttgttgatgataaaagagattttagtgaagttcaattatatggatataattgtgttaggacatataagcaatgtataacattattatctgtatttaagaatgttgatgtaatcaacttagattatgatttgggagggatagaaactggtttagatattttgttttatatgaaacaaaataatataaaaataaacaaaatatatattcacagtactcatctagtgggtgtaagagaaatggaaaaatttataaaaagaaattttaataaagtagaatatacttattgtccatattgtaattaaaaatattagaatggatgtgagcgataatgaattatgtgataagtgatattcatggaatgtataccaaatatattgaaatgatgaatttgattgatttacaagatacagacactctatatattttaggtgatattgtagacagaggacttcaatcaatgaaaattttacaggatatgatgaaaagacctaatgtttttggaatttttggtaatcacgaattaatgatgatagaatgtttaagttttctttgtcaggagataacagaagaatttttgaatagtttagatgaagaaaaacttatgagattgtctgattggatgaataatggcgcattttacacaataaaagaatttaaaagcttgagtaaaaaagaacaacaagacatcatcgaatatttaatggagttaactgcatatgaagaagtaacagtaaatggtaaagattatcttttggtacatgcaggcttaggtgattttagtgaggaaaaatcactagatgaatatgatgtaaatgattttgtttggaaacatcctgattgggatatgccatactttacagaccctaataaatttgtagttgtaggtcacactccaacattaggtattaatggaaaacctgaaatattttataaaaataatttcatagcaattgattgtggtgcttgttttgaaaatggtatgttagcatgtttgtgcttagatactatggaagaattttatgtttaagttaactttttaataaattgaaaggatgaaatgaatatgttaagaattacagatttgaaaattgataataaaagtttaggagataagtttttacttgtcgatatttctccggcatatgagtataaagacggagaacgtcaggacactgtatcaggatataagtatagtgtttgtttacctaaatttaaaatggaaaaattagttataaaagtagctaatcttaaacctttatttgacttagaaaaagaagaaatcccatatggaacagaagtaaattttaaaggtttggatgtgggttcttactctatggatgggcaaattagaatatctgcaaaagcagaagatgtgtttgtggttaagaattaattatgaatataaatagattaaataatactgatttttatattgtttctctaatgaataagagaaaaatagatattaaattggtattgcttatagggtttagtgttgtaagtgttatagttgttagtaagctatttgactattttacaggaatatacttcttttccattattgttggtactataatatcgttcattttgtttgtattatggattattattgttaccaaattatggattaaatatttaaaaatgtatttaatgaaaaaacttcctaaaaatggaaagagattaaagtatttaattaaagcgaataatttatttgaaaatggatatattgagaaaattgataaacaaggaaaattatataaagaaaaagtaataacgaatagtgtatatttaggatattatgaaaatgaagaatatatagtgattagagcatttaaaagagcagatatgtttaatgataaaatgaatgaattagatagcaaattatgtgccttatatggcgttaatatagataataaaatagatagaattgaatattgtgattatattatgaaaaaaattaaggatgagagaattatagtgaaaggaacaaaagaaagaaatataaatgaaactatatatctacccttaaataataatattaaatggaatgttttgaaacaaccacatttattactagctggtgtaaccggttcagggaaaacaacatttttaaactatctaatcattgaaatgaaaaaaatgaatagtacaatttatatttgcgatcctaagcgttctgatttatcttcgataaaacattattggggagatgagtttgtagctagtgaaacaaatatgattgcaaagatggcaagaaaagttaaagaagaaatgatggataggtttattaagtacaaagaaaatccgacaaattttgtttatgggtattcatatgttgattacggattacgacctatctttttaatttttgatgaactaggagcttttcgagcaagtgcagataaaaaggtatttaatgaggcaatggataatctaactgaaataatattaaaaggtagagaaatgggagtattttgtgttttaagcactcaacaacctaacgcaaataatatacctacagaattaagagataatttgtctgtaaggcttgcgatgggaaatatgagtaatgaggcatataaaatggtatttggtgacattgaagatttagaaactgttaatacagtaggagcaggatatatttatttagatggatatggttggagtaaaccaaagttttttgaggctccgtatttagattataaaacgtttaactttattgatgaaataaagaaatataacatataaaattttagccatcgtgctttctgaatcagtttatgacgattgttaaagcaatcgaatggaatgttcataaactggtttagaaacatgatgttgttgagcaacgctcaacatatttaacttgatatataaaacaacaagtggcgaaaagtgaaagaagaggtggacttgaaaaagaagtataaagaatataatacaaagatgattgagactcctacaactttagaaatatgggagtatttaagtgaacccataatatatagtatttctgaagataaagaaattaatagtaaaaaaggagatttggagatagtctctgaagagaaaaaaactaatattaagcaagaatatgatgctataaagcgtaagcagaaacattatgaacaaatgagatgggaaatatctagaattattgattgcaattttgacgataatacaaaattcatgacattgacctttaaagataatatacaagatgtgaaatatactaatgttgaatttaaaaaatttattaaacgattgaattattatttatataatgagaaaaaacaaaatttaaaatatttagcagtgtgggaaaaacaaaagagaggtgctattcattatcatataatattttttggatttccttttataaacttagatgaccttaataaaatatggggaaatggctttgtaaaaataaataaaattgatgtagatagcaaagataatagaggaagatatgtaagcaagtattttacaaaagatattgatgataaagattataaacaaaaagcattttttaaatcacaaaatctaaaaaaaccaatagtaacaagaaagaatgttgaaaaatggtatgacataacaaacaaaaatgttgtatatacaaaactatattctagaactataccagtattatatggattaaatactggtaaatataaagagtcttttgtacgttatataaggataaaaaaggcttaataagaattttaaattcaatattaggaggcattatgaataagaaagaagtacctatttgggaaaaaagtaatcttacattagaagaggcagcattatattcaggaattggaataaataaacttcgtaaaattacagaacaaaacaattgtgattttgttctttggaatggaagtaaaagattaattaaaagaaaagaattagataaatatacttctaaatcattttctatttaaaagttttgaaaattagatttgattatgttataaaaatagtacaagtcgattttctaccaaatggaaaggagataaaatactatggtagaaagaagaaaagataaaaaaggaagagttttaaaagagggagaaactcaacgtaaagatggaacttatgattttcgttggagaacttctgatggtaaaaggcactctgtttatgctagaacacttgatgaattaagagaaaaagaagagaaaattcgtagagataaaagtgatggtataagaacagatgctaaaaatgtgactgtgaatgatgtttatgaattgtgggtacaattaaaaaaaggtattaaagataatacgtttcaaaattatcaatacatgtataatcagtttgtatatcctgattttggcaaattgaagataacgcagataaagcgatcagatattagacgattttacaatctacttgtagatgtaagacatgttaaaattagaacaattgaaaatatacacactgtactgtatcaagtgttaaacttggcggtagaggaagaatatttaagaaataatccgtcaagtaatgctatgaaagaattgaaacaaacacacaattttgagatggaaaaacgaagagcattaacaatcaaagaacaagaactttttataaagtatattactgaaacagaaaattgttctcgttggaaacccatttttacaattatgattaatactggattgagagttggagaattgacaggacttagatgggatgatatagattttgaaaataatactataagcattaatcatacactggtatattacaatcataaagtaaatggatgttatttttcagtaaatactcctaaaacaaaggcaggatatagaactataccaatgattgatgttgttagaaatgcatttctagaagagaggaaatatcaaaaagaaagtggcgttccacaagatattagaattgatggatatactaactttatttttattaatcgttatggaaatgtacaagggcaagcagtattgaataaagcattaagacgaattatgagagattgtaatgagtgggttcttgataaggctaaaaaagataaagaaattgtattattgcctagatttagttgccattctttacgtcatacgtttgctacacgattagtagaggcggggattaatattaaagtaatccaagaggttttagggcatacagatattagtacgacaatgaatatttatgcagaggctacaaaagaattgaaagatattgagtttttaaaattaaatgattatttaaaaagtcattaattatagattacgcccactttacgccaagtttacgcctaaaaatgataaagttataaagattattaaagaattatataatgagggaaatgaataaccctaataacaaagagatataaagacttatttagacataacaaaattgtgtattactaatccctcatatgaagaataagtaaagtcatgtattttcttgtgagaatttcgtgagaatgaagcagatttcttaaatgatatctgctttttatatgcatgaatctaagaataatatcatttctttcaagcactataattacgatatattttacaaatatattgacgaatatcgatatgtatgttaatatcacatcgaagaagatagatatgaggtggtttgatggaaaaacagtttaatcaagatgctaaggtttttaaagcattctgcgatcctaatcgtttaagaatattagatattttgaaatccggtgaacattgcgcatgtaaattgttagatatattagatgttagccaatctacgttatcgcaccatatgaaactgttaactgacgctaaaattgtaaatgttagaaaagatgggaaatggtctcattattctttatctaaagatggtatacagtttgcaatagaatatttacaacagctcaaagtatgaaatatgtaaataggttaactgttgtataaattaccaccactaaataggtggaaatttatttgttttatacatcgaaatatatcgatataaggagggcgctatgagtcaaattttgctgttttttcaagaccagattcttgggatgcgatggttaaatgaattgattggatcaatattaactagcattggattaaatatagatgaaaaaataggtgggatgttgcatttttttatttatgatagtattaagatatttatattattatcggtattgatttatattatttcatatattcaaagttattttccaccagaaaaaacaaaaaagatattaggaagattttatggtatttgggcaaatatattaggagctttacttggaacagttacaccgttttgtagttgttcatcgattcctatcttcatgggatttacaagtgcaggcttacccttaggcgtaacattctcgtttctgatttcttcacctatggttgatctaggagcgctgatattattaatgagcatattcggatggaaagtggcggtgttatatgttatagctggtttgattatatctgttgttgggggaaggttgatagaaaaacttggtatggatgaccaagtggctgattttattaaacagacagataatgtagatgttggttttgtgagcttaacagtcaaagatagacgaaactttgcaaaagaacaagtcatagaaacagttaagaaagtatcaatatatatatttgtaggtgttgctattggatcagtcattcataatgtaatacccgaacattggatacagtctatactaggtgatcataatttttattctgttccacttgcaacagtagttggtgtacctatgtatgctgatatatttggaacaattcctgtagcagaaagtctattgttaaagggggcagggcttggaactgttttatcatttatgatggctgttacaacattatctttaccatcaatgattatgctatcaaaggcagtgaagagaaaacttatgattgtatttgtggcaatagtaacagtaggtattatatctgtaggttttatgtttaatatattttcatttctattaatgtagaagatatgtttaatatgagaaatgttgtacattttaatataacgatggagattaattaaatgttaaaaagtggttttaactattcaattcactcagttggtggatgtacatgtttggggttataattaaggtaggacgggaaagaagattttgttaaagaaattattttagttataaatcaatatctagatgataaatggatgatggcagttcctagataagaaaatccattattagatgttgtctcaaaatttaattatgaataaaaggagaaataagtgatgaaattatttaagaaaaaagagaaaaattgttgtaatgttcaatgtggtgatgggagtatgaagagaggattggaaaagaaagataagggttcaagaattaaagtcttaggttctggctgtgctaaatgtgcaactttagagaaaaatgttaaagaagccttggatgaattaggacaggaaatgagtatagaacatatcacagattttacagaaatagcaagctatgggattatgtctacacctgcgcttgtaattgatgagaaagtagtatcttttggaaaggttttaacgatagaagaagttaagaatatcatattaacaatagatggatgaatcattgaaacaaggtgttttttgtgaaggggatttaagcgagatgaaattgcttattattgtttttatttaatattaaacaatttgaaaggataatttgaaagaaatgaataatatgccaagagtcgcatttatatgtgttcataattcttgtagaagccagattgcagaggcaatagcaaaattgtttgcttctgatgtatttgaaagctattcagcaggaacagaagtaaaaccgcaaataaatcaggatgctgttaggataatgaaaaaacgatatgatatggatatggaaaaaacacaacaccctaagttactagtcgatattccagaagtagatattgttataactatgggatgtaatgttaattgtccatttcttccttgcagatacaaggaagattggaatttggatgatccaacaggtaagagtgatgaagaatttggtagagtgatagataatatatttgcaaatattaatgaattatctacaagaatatccaaaatgaatatctaaggcaaataaaatttataggatagggagtaattctattcttgttgagaataattattatatatttcaactgacacactttccatctaatctttatacgcccataaataaaagtcatagattttccgtaaaaatagaaataaataatcttcaaaaatatattaaacataataaaaatatgattaaatcagtactttttgattttataaaagatgtactattacgttacacatgaagaaaaaatagataaacaatcaggcaagatgtaataaggatattgttttatttagtacacaagttctcaatattaaaaaaggtaagttgaattgaaatttattttttttagtacgtataattagttgaaaaaattaacgacaggagaaaatatatgaaattataaaaaatataaagataatttgattaagttttggattgacactttcacatgttaagagtcaattttttaattaccatagtttagcaaacaaaattcactttattcctgctatacagttttattttcaacaaagcgctgcaataaatatagtaatgaattggaaatagtatcataaaatataaagtatataggtaaggaggaagtaaaatgaataataattatgagcttggaaaagtaattgtagcattaaatataaatattacttctaaagatgtactagactattatattgatcttgttttagatgggattgattatgaaaaagcagaaatcatcttccattcaaagaatactgaaagtctaaatgagggaactaatatagttcttatttatttaaaagataaaaatcctcatgcagttactaatgcagttgcaaaattatcatcaagtccatatattgtttatgcagaaccggattatattgaagaaatgcatattatctcaaatgatcctttatacaatcagctttggggaattcaaaaaatcaatgcaccgcttgcatgggattatacaactggtgatagtagtatcagtgttggagtgattgatacaggaatagatcaaaatcatccggacataagagaaaatatgtggactacgtggaatggaagattaatttatggctggaactttgcagataatagtagtgattcaatggatctagatggtcatggtagtcatgttgcagggacgattggtgcagttggaaataatcgtattggtattactggagtatgctggcaagtaagagtagcagctttaaaatttggtcttgatgttgcttcggcaattgcggcaatagattttgcaaattattataagatttctattttaaatgccagttggggtggacgagcttattcacaagctttaaaagatgccattgatcagtatgatggcttatttgttgcttcggctggaaatgatggaactaacaatgatgttgatccaatgtatccagcatcatatgattgtaaaaatattatttctgtagcagcggtcgatccctatgatactttagcccgtttttcaaattatggtcttaaaactgttgatatagcagcccctggaacaaacattctcagtcttgaccttgctggtgagtatagccccttgaatggaacttcaatggcagccccacatgtagcaggagcagcagcgttattaaaatcaagtatgccgaatatctcaacaataactttaaaaagaattattttatcaagtgcgatggaaaacccagaacttaagggaaagatattaacgggaggaatattagatatggaaacaatgtttaaactagctaactgctggcatggacgagaataacaatatatatctaataaaaatgtgatgaataagaaaaataggttataaaaacattttaactattctttaaataatttaaaatagaataaaggaagtgagaatatgtataaccctcaattagaaacatttataaaggttgttgatcgcggtagtttctctaaagctgctgaggacttatttattagtcctagtgctgtaattaaacagataaatattctagagacaaatttgggtttaaaacttctaaaaagaactcatcaaggggtatctttgacaccagcaggagcatctttatacagggatgccaaatatttaattaaatatgcaaaggattcaattgtacgagcacacaaggcgatggaaaaagaagaaatggtaataagaattggaacatcaaatacaacaccaagtcaatttcttatcgatttatggccgcggattcatgaattatgtcctaatttaagaattcaactaattccatttgaaaatactccggaaaatgctcgagaaatactagctaatttaggcgataatattgatttggttgctggtgtatttgaaaaggataatttcaaacagcggggctgtgattctctagaaataaaaaaagaatcaatttgtcttgctttatctatttatgatgaattaagtaacaaagataagctgtctttgcaagatattcatggacgtgaattaatgctgattaaaagaggctggaataaatatgttgatgaaatgcgtgatgatttaattaaaaatgatcctactattataatcaaagagtttgagttttttgatatctctgtttttaatgaatgcgaaaataataaaagtttgcttatgagtgtcaagagctggaaaaatattcatcctttaattaaaactattccagttgaatgggattattatatgccttatggtttattgttttcattagagccttcacggcaagttattgagtttgttaatgcagtaaaaagagttttagatatatagtatcgatataaccctaaggttatatcgatactacttattgagacttctatgtttataaataattatatattataaagatgcaaaagaaatataaatataggagaagataaaaatgagaaaaacgagaatattaggtcaaggattagaagtatctgctattgggcttggatgtatgggaatggatcatgcttatggggctcctgctgatcgtgaagagatgattaaattaattagacatgcggttactttaggatgcaatttttttgatacagctgttgtatatggtgaagcaaatgaagttttattaggtaaagcattggagattttccctcgagatgaagtaattattgctacaaaatttggtatttatggacaagaaatcgttgatggtaaaccacaaaatattttaaatagtaagccggattcgattagagaacaattagagggatcgttaaaacgactaggcgttgattatattgatctatattatcaacatcgagttgatcctgaagtagaaccagaaatagtggctagcgtgatgaaagagttaatagctaaaggaaaaataaaacattggggtttatcaaatgcaccattagattatttaaaaagagcacatgcggtatgtccagtaacttgtattgaaaatcagtattcaatggtctttagacagcctgaaaaggaagtgtttaaagtttgtgaggagttaaatgtaggatttgttgcttattctccactaggaaacggatttttatcaggtaaatatacgctagcaacaaagtatgctgaaggtgattttagaaataatatgggacgttttaatcctgaagtaatgaaacgtaatcaggccttattagatttagtgcaagaaattgctgaacgtaaaaatgctactagcgcacaaattgttctagcttgggagattaatcaaaaagattggattgttcctattccaggaacaaccaaaatacatcgtttggaagaaaatttaggagcaatggaagttgagttgactgaacaggagatggcggctattaatcaagcattagacaatcttgatattgatgaaacacatttttaagcagagaaaagtacaaaggaatttgtactttttagtgttatacgtttaatcctgaataatgaataatatagaaactatcacggtgtatttagttttgaaaaagtgtattatttggtatatcggcgttattagtctataatagagttgaaagaaagccggtggtaaaatgatgccctatatattgatcttggttattctaacacttttatggttaggcgcattttggaggataaaaagaaagcaaaatataaacttactagctggctttttatttttcatgtttttaagtacctttgctagttttttagtaatgttaggaattaattattcaaatagattagtatatttattagttggtgtaatttttttatttgccttgtttgttttattatttggagtctatatcttaattgcattcttattaataaatagtgttatcattcttcgaaaagagaggttcagtctttcgcatattttgactttgttggtagcagtagggataattttactgattacactatcatcatttttaggtaggattaatccaccattaccaattatggcattgtggagtggcctgatcgtaatgatcttatttcttacttttcatattttcttatttatagaaactttgatattaacaaatctttttcatcctagaaagaatttaaattatatcattgttttaggaagtggactaattaatggaaatgtttctcctttattagcaaagcgtatacaagcggctttaaagtttgctaaaaagcaagaaaagaaaaaaggatttgcaccttatttgttgatgtccggaggacaaggaagtgatgaaacgagagccgaagctctagcaatgaaagagtatgcgattgaacagggttatagtgaagaattaattataacggaagaaaagtctaaaaacactcttgaaaacatgcagttttctaaagcggtcatggaagaaaaaagccatggtgaaaactataaatgcgcttatgccagcagtagttatcatttaatgagggcaggtatttatgcccgccaagttggtctgataatgagcggattaggtggtaagactgctttctattatttagccaatgctgtattaagagaatatattgcctatctagcaatgaataaaaagctttatttggttgttttagggagtatttttatgtttggaactttaatgtacattttgtttagtgcattaattggttaaacaggggtcaaaggagattaaaaggtgaaatatgaatggatagacagttatttattagcgaaggcgggaatttctaaaaatcttcaaacagaatggaattggattagatatgttattgacggtaagatgtgtgtggcagtttgtctagatgaacaagataatccatattatataactttaaaattaagaccagaaaacggaatggatcttcaagaacagcatgaagatataattcctggttactatatgaataaaaaacattggaattcaataaaagtaaatggttcgattagcgatcaattactaaaggatatgttagatgaagcttatgagttggtattgtcgagctttagtaaaaaaagacagttagagatattatctttataatcaaaaggggaattttgatgaaacgatgcattggaatgacgggaatagtttggaaatttaaaggaggattaaaatgactattctagaaaagaagattgctaaaaatattgatattattaaatctggaaatattacaagattaaagaggtaagatgataaaaatcatgaatttatatattttcatgatttttttagttgaaatgtattctttttataagcaataataccatttttctgtagtttacttaattcactagataaagcacttctctctactgctaagtagtcagctagttgttgacgattaaaaggaatttcaaaagttaaagaattattttttagtgcttgcgaatttaaataagaaagaattttttcttgagttgttcgtctagttaagtgatgaattttttgagttaaaaggacatttttgtttgagacgattgaaaggagattttgaattattttatgatgaaaagaacatgagtgttggcatgatctaataagatgggagatatctaagaaaagaattgttgttatttctgtagctacgacatttaaatcaatttcttgttgtaaggcacaggcataagattctaaaaagaattcactggctttaatttcgctaataattgttttattaccccaaaaatcaatatgataaatatgtgcttgaccgtcaagaactaatccaatttcatgaataatatcaccttgtctgataattgtttcgtttttttgatatgttttttcatggcttttcaagcagtttaatagtttttcaatttcagcaggatcaattcctttaaataatgaacattgttttaaaatttgtaattttttcataatttgctccttttgttgtaaaaacaacataaatgttataaatactttattatagtatggctgtggagtcaagattaatactctcgattaatgtgattattaaaaatatagagattataaaggagaaattatgatggaaaataaaatgttttgttatcagtgtcaagagacagtaggaaatcagggatgtagtcaagttggtgtttgtggaaagaccccagaaacagcagggctgcaagatttattaattgatgttacgaaaggcttagctgaggtaattaatgaggtacgttgtaaaggtaaagaaatcaataatgtatatgatgatcaagtgagtgaaaatctatttattacaattactaatgccaactttgatgatcaaatgattattgaagctgttagaaaaacacttactttaaaaaaagagctgcttttacagttagatgatcaagctgtactttcaaacagagctctttggatggagatggagatagaagcaattgagaaaagaatgcagatggttggagttttagaaacagcagatgaagatattagaagtttaaaacagctgattacttatggtttaaaaggaatggcagcatataataaacatgctcatgcattagggtttcgaaaagatgagattgatcgttttattgaaactactttggttaagattgaaacttcaacgatgtctttaaatgattatgtagcattaacgatggaaactggaaaatatggtgttcaggtaatggaattattagatcaagctaatactagcacttatggaaatccagaaataacagaagttaatattggagttcgaaataacccgggaattttagtttctggtcatgatcttaaagatttagaaatgctattagaacagactaaagatacgggaatagatgtttatactcatagtgagatgttacctgctcattattatccattttttaaaaaatatccaaattttgttggaaactatggtaatgcctggtggaaacaaagagaagagtttaaggcttttaatggaccggtcttattaacaacaaattgtttagtaccgccacttgctagttatcaagaacgggtttatacaactggagcagttggttttgagggatgtgttcatattgataaagatgaacacggctacaaggatttttcacaaatcattgagcatgctaaaaaatgcttagctcctactcaaattgaaactggtaagattgttggtggttttgctcatcatcaagtacttgcgttggctgaccaaatcgtaacagctgttaaaaatggggatattaaaaagtttgttgtaatggcgggatgtgatgggcgtcatccaacccgtcaatattatactgattttgctcaaagcttaccgacagatagtgttatcttaacagctggttgtgctaaatatcgttataataaactagatttaggaacaatcaatggtattcctcgagtattagatgctggtcaatgtaatgattcttattcactagcgatgattgctttaaaacttaaagaggtatttgcattagaagatattaatgagttaccagttatttataatattgcctggtatgaacaaaaggctgtaattgttttattggcattattatcattaggagttaaaaatattcatttaggaccaactttaccagcctttttatcacctaatattgttgattttcttgtagataattttcaaatttctggtattcaaagtgttcaagaagatttaaatttattttttcctcagacaaaaaaagaagataagtttcatcgcgatatgctagttggaagtattattggtatggatccacaagcagcacaaattttaagcgatagtggaatggggtgtcttggttgtccggcatcgcaatctgaaactttagctgatgcttgtctagtccatggtttagatgttgaagaaattttaaaacaattaaatcagtaggaggaatttaatgagtgcgtttttagggccagtacattattggttatatagaaaaattcaatatcaagaacaattaaatcaaaagattcttaaaagaatttgtccccagcttaatgagattgttgctcaggaatgtggcacaattcaagatggaagtctagaggaaattattgatcatcaagcaattcatcaatggctttctatggaattgatgatagtagaaaaacgatttgcatttattgttgaacatatagaaaaaagtgattttgaggaagttagggaagtgttgttcgaggctggcaaagaaatttcaatcaatgagaactatcataactgcatagaattattcaaagtaattaataattaccttatcgatggaatgccttgtgataaaggtattaaaataatgagccaagaggaaaatcaaattatttatgaatataatgaaatggttcatcaatatttagattttgaaatatttcaaaaatatcgcaaagcttggcttgatggggtactttcagatagccatatagtattttcaagacttaattataatacttatatgttaaagatggaggaataaaatgacaaacaatataattaaagatttagaagctgatcatcaaaaaatattagcatttgttaatgaattagagcaacgtttaatagaatttatggaagcaaatatttttgattatgaacaaatgaaaagagatattttatttattagagagtttgctgataaagaacatcatcagcgtgaagaaaagattttatttagatatatgatagagtatttaggtaaagttgctgaaaatttggttcgacatggtatgattgttgaacatgatcttgcaagattgtatgttaaacagtgggatgaagcacttcaacgttatcatcgcaatcatttgttaattgataaactaacaataatttcaaatggacatgcttattgtatgttactaagaaggcatattgaaaaagaggatacagtagtttatccgtttgctaaaaaacatttatcagaagaaatctttgctgaaatgatcaaagaaaatcaaaattattaagtataatataagtgaaaagcagctatttttgtaatagttgtttttttattaaaattacttaaattgaggagtgttgcaaatagtgatataattatgttctatagttatgatagggggtagagtgatgataaagaaacataagccatttattgctgcaattttaatatttatgataatgagcattctatcattttttatcttgtacggtgtcattaatgataaggtagcagcagccaaagagaaaattcattattttacagaggctcaagttagtcagctagatcgggtcctgtcttcgtatattcaaactgctgaaacgttgaagctgctaattgtagatagtaatggtaatattaatgattttgatcgagttgcacatcaactatataatgatgataatacatttagaagtattcaattagctccgcagggagacgttcaatatgtttatcctcttgaaggtaatgaaggagcttttggaaatatcttcgaagatccagaacgtgcaacggaagctaaaaaagctcgtgatactggggaaactaccttggctggaccattcgaactctatcaatcaggaaagggaattgttgttcgacaaccaatttatttagaagaaaatggagaaaataatttttggggatttgcaattgttgttttaaatgtaccagaaatttttgattcagtacatctagattcatttgaaaatatgggatatgaatatcagttatggcgtattgatccagataataataaaaaacagattattttgaaatccgatcatgaactattagatgacacaataaatttaagttttgaagttccaggaaatacttggactttgagtgtttcaccaattaacggatgggttcgaagtagtgatttaatgccagttattatattagctatctgtttgtcattgttgataccgttattagtttatacattactaaaaattaacgaacagcgccgaagaatgatcgatatttctaatcgtgattatctaacaacgctttataatggtcggaaaatgaattttgttttaaacgacttaattgctcgtcaaacttcgtttatttttgtttatttagatgtagataaatttaaagttgtaaatgacacatatggtcatttagcaggagatgtgttattaaaagaaatagctttacggatcatgaggtacttatcacgagaggattatgcttttcgagtaggtggtgacgaatttgtcatcattattaaaaataattcttccaccaagaagaccctccaaataattgctgagcaaataacagaaaagataaatttagatggctttgaatattatccggaagttagcatgggatatgctgtttatcctaatgatggtaaaagtttagaagaggttattaaatgtgctgatagtcggatgtatgaaatcaaaaaacataagaatatataatataaaacacagtgattgttaaatgatatgattcctcataagtagtttttggtcatttgccctatctacttgatagagagaatatcaaaaatagatcactgtgttttttgttataaattagaatattgttgtggatcaatcaaactagcagctgcttgatcgcaaataacagtaaagttagggtgaagctttaaaattgttgccggcacatcttgattaacgggctcatctaagaagcgtttaaaaatttctgctttttctttaccattaacgatcatgactagatgtttgactcgcattagacttttaggacccattgttaaagtatgaggttgtcgaggacggtctccataatctggattaacggcctgctttttcttgaaatcaatacagtaagtataactgtcaaaaggtgtacaacgaggacaattaccacaaaaatgtccatcatatccaagaccaatcaccattacatcaattcctccagcatttctaattttattatcatagtcttgccagtcatttgaagtcataatgtgaatacgctcatcaggaatattagcggctttaaaaaataattcttgcatatccttccagtttggtccataaggttcatcaatatatgggttttcatcaaaaagataatactcaatatctttaaatttagcctgattttttacataaggaatcatcatgtcatacatcgtcttaggagaacgaccggaagtaagtgaaatattgacacgtttatcttgcatcatggcacctaatagaataaacattgcactttcactcattttttgttcattttcttcaattattagtttcattttagtaagctccttttcaatttttgattaaaatgatgtaaataaaaaaatgtaatatataatttaagtatactgtatttttttagatacacaagtttatcggttgtaaatgatcaagaaaagttaactatatataaatcaagtaatttttgataattagctaaaatattttttagttctttgaaaagtgaattttggttacgctgaaaactactactgcatgcagctttttaaaaatattaagttcagcatttttaaatgagcagtttttatcaaactatatgttttcagacaataatttatagattactcttgtaagttttcgtactgagtggtcctgggcacatctgtggaatttaccttacagtcgttttagtttataatatttattgaaagtgagattgtacttgcagactggcagaatgcattgatatagctttttcttaatagcacgaaccacgttttgactgtgctgttcgagaaattgactgataagtaccggggtctatacctacaaattctatgactttgacagtagagctgaagttatggatatcgctagtctcatctaaatttgtcaacatcgatatcagtgtaaaatatggaaaacacattttttctttatataaggtaatgaaatgtgatcaaaccacaaacagagtatcaaagacctggtgcgaaatacaagttcaaaaacttatctaactgattacaattaagatacaaagatgtggtattaaccttttccaggtagtcgggctacagaaggcaaaaacaaaagtacctattcacaattcgattctaaatgaaatctaatgaaaggaagaggtgtatacaattgacggttaaataagttaattacaatataccagaagtcaaaatatgaaaacattatatatgatgcgtcatggacaaacgttatttaatcaaaaaaggttaatgcaggggtggtgtgattcacctttgacagaactgggaaaaagacaagcaagatgtgtaaaagagtatttggagaataatgagattgtttttgatggtgcttatgcatcatcttcagaaagagcttgtgatactctagaaattgtaactagcctcccatatcagcggcttaaaggtttaaaagaatggaattttggtatttatgaaggagaaagcgatgatcttgatcccccttttccatttggcgatttctttaagaaatttggtggtgaaagtgaaaatgaagtaagtgaacgtgtttcaacaactgttttagaacttatgaaaaatactgatcaagaaacagtgttaatagtctcacacggtctttcttgctattgttttgcgaaaagatgggaacaaaatcagcaagtatcgctacctaatgatatgcccaattgtgttgttttaaagtatcaatttaatgatgagcagttttcattagttgaagtcattgatgtaactagtgaattaaagtaaaaaagtctagatatagaaattaatctatatttagactttttaatcaccaaatgagatacctagtaatttagcgtctttaacttttgctcctacagcatcaacatattttagtttaccagcactttcaactaagggaatagcagtaactccattattttttaagataactaatttgccataatctccgcccataactaaacgggctccagctaccccaaattgagttgagatcattcgatcgtatggacatggctgtcctccgcgctgggcatgaccaatacatgacacacgaatttcgctatcaatatatttttctaattctgctgcaatctcgtaaacaactgattgaccattgcgggctttaactttagctttatactctttttttgatagtgttgcttcttctttggataaagcgccttccgcacaagcgataatactgaattttttcccatttttttctctagttttaatagccttagctacttctttaatatcgtaaggaatttctggtaacaaaattacatcagcgcctgaagcaattcctgctgacaaacaaatatggccaactttatgtcccattacttcaattacaaaaacacggttgtggctggcagcggtagtatgaatttgatcaaggtatgtggttgcaatatcaattgcagactgatagccaaaagtataatcagttccccatgtatcattatcgattgttttaggtagcgctataacattcaatccttcttgagagagcatgttagctgattttatagaaccatttccgcctagcacaacaagacaatctaattttaattttgcatatgtgtttttcattgcagctactttgtcaaagtcatcttcaattactcgcatttttttaaaaggacaacgtgatgttcctaaaattgtcccaccaatattaattattccagaaaaatccttgggcttcataattttataatcttcatacattaaccctttatagccttgaagaaagccaataatttctatatcgtttacatttcgatataaagtttttgctagaccacgcattgttacatttagtgcttggcaatcaccaccacttgttaaaatacctacccgcatataatcactcctttattattatttatattgccaattatttgaaaaaatattcctgactattcaattctggctctttattttttactcgtttgtaagtaccatcttctaataagcggcatgctttaacattatctttcaacattgtattaaacattgtaataattcgttttcttaatttttcatctaaaattggggcagcgacttcaacacgacgtgataaatttcttgtcattaaatcagcagaagaaatgtatactttttgagcactgcctttaccaaagatgtaaatacgtgaatgttccaagtacctaccaacaatagaaattattctaatattatcagttaatccctcaacaccaggtaaaatacaacatataccacgaacaatcatatcaattttaacccctgcctggcttgcttcgattagcttatcgatcatttctttactagtgacggaattgcatttaaatccaatataagcttctttacccgctttggctaaagcaatttgattatcaatatgttcaaatatttttgtaatcatacagttaggagcaaccattaaaagattaacttcattttctgtttcgccaagacatagatgattaaaaatgctgttgatttcttccccaatttcgtagttagatgtcattagtgataaatcagtataaagctttgatgtattttcattatagtttcctgttcccacctggctaatataatgaacaccctgattatttttataagttattaaacataattttgagtgaactttaagtccatctaaaccatagataacacggcatccagattcttcaagtcgttttgaccagtcaatgttattttcttcatcaaaacgtgctcgtaattcaactaaaacaacaacttctttaccgttttcagcagcttcaatcaatgatttaataatcttagatttctttgcaacacgatataaagtcattttaatactggcaacatttgtatctcgactagcctcatctaataaacggagaaatggtgacatcgactcatatggatatgataataaaatatctttttttaaaatttgtttgatcattggaacagtattttcaactaaaggactgtttttagcttctaattttttatagaacatttctgggtgaatgtagcgtaaatgatcacgtaactcactagtgaatttcaaatctaatggagcattacactcgaaaacctgatgttttttgaggttcaagaagttcattaacatcaagatttctaactcttctaagcctggtgatacttccaaacgaataggacataattttctacgttgtttaattaatgtttccatcatttctcgatagtcttcatgaccttctaaagagtgatcatcttcatcaatatcagcacttcttgtaactctgatgaaacctttattttttattgtatatttagagaagatattagaaataaaatgcaggatgatatcttcaatcaaaataaacttcccttgcatactaggaatcgcaatcattcgttcatccatagcatttgcacaagaaacgattcccatctttctttttcccttctttgattctaactgaacaacaacataaacttcacggttatttaaaaaagggaatggttgacgttttgaaataacctggggagagattaatggaagaatttctcgttcaaaataactttcaaaatatttacgatcttctttgttctttaaatcacggtattttacgattccccatccatgagtttttaattcatccataatactttgataaatacgatctttctttttatttaaataagtaattcttcgtaaacatgcctttagctgttcttcaccagtcattccagttttattgtctttagaactaggatagaatagcatttgatcatataatgatccaattctaaccataaaaaattcatcaagatttgattgaaaaatagaaataaaacttaacttttcacctaaagggactttattatctttagcctgcattaatactcgatcattaaatttaagccaagataattcacgattttctttacatttattcattgaaatggcgcctcctattttgtttctaaaaataacataatatttattaaaaaaattatcaagtaaagtcggattacttacaaaactcttacgcaaatttaacgtttctttaatattagtatagcacttttgattttagtattcatcaaaaccataaatatgtaaaatgatttaaatcattcaaaagaaaaaggtgttgtcaaaacacctaaaaatattacgattctatttagatttattatttagtaattgctgatagatcatttcatcgtcctctttgaaaacgttaaaaataactttttcaatctgacttcctttaagaaatgtggatactgtattgactgcaatttgagctgcttcttttttaggaaagttaaatactcctgtagagatacaacaaaaagcaatactttttaatccataaacctcagctttttttaaacaattacgataacattcagctaataaaaagcgcttttcatctgttagtacattatgaacgataggaccaactgtatggacgatataacgacaaggaagattataagcattagttatttttgcttttccggtgggctcaagataacgctgtttagacatgatttggtgacattcatttcttaattgaactcctgcaaaggtatggatagcattgtcgatacaattatgtccagggataaagcatccttccatttgattattggcagcatttacaatggcatcaacttttagttgggtgatatcaccacgccagatattcattgattttttgaaattgcttgagtcaatgattccttttcgtttaatttcattttttaacattttgttttgaatcataatgaatttgtcagtagctgtttttgcttcacgaatatttactaatgagcgataaagggaaaatagttgtgcttgttctgtaggaagttcaatttcaagtttattttcttgaattaaatagttaattaaaaattgtaatcgggttatttgattcatagcaatttctccaaagacgataagacattatgaatgttatcgttgatcatgatagtctgtttttttaattccgaaggtaaatcaataatatcttgattgatgcaggcataaatagctttaggattctctatagttaattgccaaaatggatatttgataattccaggggtattatagccaactcctaattctaaataaacgattttggaataatgatgtttatttaaaaagtgataataacgttcttgggcatgataccagccggaatcttgaacaaatgttttatcacagcgaagattcattgtcattggagcattacatattggacagtacggaattagtgaactgggaattttcaaatcatgctgttgtttgatcattgtaacaactgtctcgtaattatcataagttttttgatggcatggttttgaacattgccaaagtccgtaatctccttgagtataaaataatttttctttaataaaaccagctatttgaaactgatgatcaacatttgttgtaatgacgaaataatctttattaatgagtaggtttaataattttttataagtatctttaggggcttccaaatagcggttataataaatatgacgactccaataagcccagtatttctctaaactaggataggggtaaaagcctgccgaatacatatcttgtaaatgatattttgtaatgaaatcattaaaatattttttaaaacggttccctgagtatgacagaccagcggcgctagaaagtccagctccagctccaattaagattgcatcacattttttgattgcttgactcaattttaaaatatcaagtgattctctttgaaacattataacactcccttctcatcgttattatccttcaatggttgctatttgtgaagtacgcacataaaagtggcttagtttcttttatgtaactaacttgactttcataagtatagtttataaaatatacttagttactataagaaactataaggagtacacatatgaaagaatttccaaaatgtccagttgaaactacattattattaataagtgataaatggaaggttttgattattagggatctgctaccagggaaaaaaagatttggtgagttaaaaaaatcaatcggaacgatttctcaaaaagtattaacttcaaaccttcgggcaatggaggagagtggattgattagtcgtaaagtttatcccgaagttcctcctaaagtcgaatattcgctaactgagttaggttatagtttaaaaccaatcttggatgctatgtatagctggggtgaagattttaagaaaaatcatcaatcaatataataatggatagagtctcagtgttaatattttttggatggctgaatgatcttaaagggggttcagtaaaaaatagaaattgataaaaatacgactcataaagatataaagtgtcaaatttctagtttcttaacaagtataatagtgcatgataataacttatgactagagagttagaggggaaaattatggataatgaagatttagtaagagaatatagcaataatcttacaacatatgaacaatttacaaatttgatggaaacatatatatgtaatttgttgaatcgtgaacaaatatcgtttcattcaatcactagtagaacaaagagtattgagagtttatctaaaaagatagagttaaaaaacaagtatcaaaaattagatgaaataacagatttatcaggtattagggtaattacatattatacggatactgttgatcaaatatcgaaattaattgaaaatgagtttattattgatcgtgataattctattgataaaagaaagagtctggatccaaaacgttttgggtatcgttcgttgcattatgtggttcaaattgatcctaagtatgttaaagcacaggaatatcttaagtatcataatttaaaattagaaattcaaattagctcaattctgcaatacacatgggctgagattgaacatgatttaggttataaatctcaagaagagattccctatgatattaaaaggagtttttcacggttagctggattgttagaattggcagatgaggaatttttaagaattaaaaatgagatctttgcatatcaaaatcatttgctgctttcttatttaagtgctgatattgataaagaatcattagctgtatttaaagtcaaaagtcctgaatataatgaattgacagaatttttaattaaagaaatgaaagctaagaaggttagtcagggtaattttgagaatatcattaggatgtttgagtatttgaatataagtaaacttcaggaggtagatcaaaaattaaagcaatatcaacagctgataatggaacacattgatgttctttatcgtgatgcaacaaggactaaaacaaatataatttctggtgatatgccattgttatgtttatgctattttattttagtagtagagaaaggtgaagtggagtttgagaagttcacagaacagtttatttctagtgttaattttaaaaatcgattaatagaattaaaaagaatattgaaagattataaattagaagctgctgattaaattaacagctatttaaactagagttagctctagtttttttataatgtttaaagtatttataataatggatataaatgtaattgtgatcagtcttacgagtttgctaggggctttttataagttatttagaacttacaagatattataatgataacgcttgctttttctgaggaaaaagatgtttatgataatatttatggtataattatgatgttagtattattaattgtttcgtttatattgggctatagtttaggatttgaggaggaataataaaatgaaaaactggtggcaaaagagtgttgtgtatgaaatatatgtgcggagttttaaagataccaatcatgatgggatcggtgatattaatgggattactgagcagttagattatttagcaacattgggagttgatgtgttgtggatcacgccaatttatgaatcgccaaatgatgataatggatatgatatctcagactactatgagataatgcaatgttttggaaatatgactgattttgagaatcttttaacgcaagctcataagcgaaatattaagatagttatggatcttgttgttaatcatacctctgatgaacatagatggtttatcgaaagtaagaaaagtaaagataatccatatcgtgattattatatttggaaagatggtaaagaagatggcagtgtaccaaataattggacaagttgttttctaggttcagcttggcagtatgatgagacaacgaaacagtattatttacatttattttctaaaaaacaaccggatttaaattgggataatactgatgttagaaatgaaattcaaaaaatgattgcctggtggcttgataaaggaattgatggatttagaatggatgtcattaatttgatttctaaagatcaagataatatttatcaagatagtccaataaaggggcatagtgtcagtgctaatggacctcgtgtccatgaatatattcgtgagttaacagataacgttttttcaaaatatgatgtgatgactgttggagaagctccagcagtgacaacaaaagaagctattcaatatgcaagtaatgatggaaaagaaatgagtatggttttccaatttgaattaatggatgttgatggtggtgaaaaacaaaaatggagtgatgaaagatttaaattaacggatgtaaaagcaattttaagaaaatggcaaattgatatgcatggacgagcatggaattcgttattttggaataatcatgatcaaccacgagtagttagtcgttttggagatacaagttctaaagaaacttgggaaaaatcagcgaaaatgcttgctactgcccaatattttttacaagggactccttatatttatcaaggtgaagaacttggaatgactaatgttgagtttaagaatattggtgagcttagagatattgaaagtataaattcttatcatcagtatgttgaagtggaaaaaatgtttacccctgaagagatgcttcgatttattaataaatcaagtcgtgatcatgcacgtactccaatgcaatggaatgatctagaaaatgcaggattctctgatgctgaaccatggatcaaagttaatcaaaattataaatggcttaatgcacaagcacaaataactgatgaaaactcaatttttaattactataaaaaaatgatctcaattttaaaggaaaatgaagttgttcagtttggtgattatcaagaatattatgaggatagtaatgaagtctatgtttataaacgggagtatgacggaaaaaaattatttgtcttatctaattttacagctaaagaggttacctatgataaaactttatttgaagctgaagcaaaggtgttactaggaaattataatgatttgataagagggaaattacgggcttatgaagcggttgtactagttgtttaaagttagtattagggatgatcttgaatgatcaggaggtaagaaaatgcctaaaaaatattttaagattggttgcactgtaattatagtaactttaataggattatttttaaaaaataatgctccggctaataattataaaaatcccgatactttgaatatacaagataaacaaagtatgatgatggcagataaggctgttgaaaaaatagctaggggaacatccgggaagtttgaaactttatatttaggggctgatggtcaatttcaatggaatattttaaatccggaagaaactagcttttttgatgaagatggaaaagctattaaatccattttattaatttcaacaaagcttcaaacctcaacaccatttgatcaggaaagtaatcgctatgaaactagtactttacgacaagcagagattgcgttagcatctcaaactttatcaccaaaagaagcagaagtaatatttaatactactcaaccaggtggtgacgttgttactgttactagttattcatttatagaatcacagttatttggtgataaattttttgccccaacagcaaaaataatgaattcaaatagttgtggacttgaagatcgtcattatcgtcaggaggggaattattactggttgtcagcagctgctaaagatgatcctaaattagcgggatatatctctaaatgtggagtttttgcacaattagatattactgtcgagcatcttagtgcaagagctactgctaatcttgatcctcatgcagttttattttttgctgcagcccaaggtggtaaagtcagtggagtagtcgggagcaaagcaatgcaggacgtggaacatcaagaattacttagtgattatcgtttaacattaaaagatgcttcacaaaccttagttgtgagcgatcaggttaaagaaaataataaaataagttttaattataatgcccaaggcgatggggatttactcagtgcagttataattgataaaacacaaaatgagattgtatcttatggtcagttagctgatattagtgttactaaaatgggtgttgctttaattgagttgccaaaaaaatatgatcatgataactatcagataaaagtgtttagtgagcaatataacggggactacaaaacggattatgccagtgaattagttgatttgaagattgaataaaataaaaagagctggatttaactgtaccgacctcctaaccgttagaatttgatatgtatctaaaattcagggcacatatcatttttgatctaactttctgaggtcacatcaaacgatttgttaaatctagttcttttttattaaatacttttgctgcgttcattggctttatgaactttacaaggattgccataagcaattgtatcagcagggatatcttttgtaacaacactacctgctccaattacggtattatcaccaattgtaactcccggtagaataattgttcccccgccaatccaaacatttttaccaataataactggggctgtttgtgttttacaaaaattgaatgtttcattttcactgatagtaaaacgatcaagataatgagtaggatgataagcggtatatatttgtacatttggagcaattaaaacattatcaccaataataattttattatcatcgagaaatgtacaattcatattaacttcgcagttattcccaaaatatatattacagccataatcaacatgaaaaggtggggtaatccataattggtttccaactttacctaataattcattaagaagctcactttttcttttagtatcgctagaattggttagattataatctcgggctagatctttggctcgatgccatagagcaagtaattcggcatcgccacaatcatataattccccagctaacattttttctttttcagtcatttaagataataactttaatagatcaagtggctgctcaaacacgtgatctggtttatcaatacctttagcggaaacacttccccattttgcataaccaaagtcgataccagcgtttttagatgcgagataatcagaatgagcatcaccgatataaataacatcttcaggttgcaaagataatcgctttaaacattctaataacggttcgggatcgggtttatgcttgactgtatcgttagctaaaacagcagttttcatatatttatctaaaccttttgcaacaaaatcaatttgatactgtgctgttgtttttgctgaagcaactgcttgaatgatgcttccgtcaaatgcttcaaaaatttcttcaaaccctgggtataaagaagcgccttcttcatattcattgacatatttaacccatctagcgtaagccttttctttatcagctacttgtaactcttccattactttcatacctggatagggtaaaaattttaagacttgttcaaatgtccaatcttcaccagtttcttctttaataatcttaatcaagggatacatattcatatttattgtatttaatactgttccgtcaaggtcataaataattgctttatattttttcattactttcctccactaattgttttaatattttttcaattcctaaataatttaacccatggaataagttatctaaatattgtttataaactttaatatcataaataaattgtgagtgtagataagtataaatagtttcattaattaaatgccaatccaagtcccaatcaagttcaagagaaaggtcaacatgctcagggtctaaagacgttaaaacaattattaatagataagcaataatgttttgaaagtcttttggcttgttacatgtcctaactgcttgatttaaggaaatatcgtgataaggaataagtcctatttcaccagcaattccatatttgccatgaactaattgtccattatacatatatgaactaccaattccctttttgtttaggtgcaaataaattgaactatttttatgatgatgataacaagtacctaattgcatcgctttgacatcgttttcaactagaataggaatattgatactcttttctaactctgtgatccaagtgtgggtttcaaagtggttattgtggtcggttaaatattcattatctctaacgattccttcaactgcaataacgatacattgacaattgaatttggtgagaagcactttaattagagtaattaattgttgttcatcctcaaattccagaatatcggttgttagtatttttttgtaagaatgaatttgataagttattttagggttttgaatatagagacagattatattaaaatgcttttcaactaatgcaaagcgggttgggcaacgtccaccggttgaatgatcgttacctgtttctttaacaatatcgtgttgttgcaaaaggcgaatcatatttcttacactaggctgtgataattgagtatcattgctcaattcgctcattgtggcactgtctctactaaataatgattgtaataatagatgtaagtgatgtttttttacatctttaagaatttttttggtcatgtgtgcctcctgcttttattatactttaataaaagttatttacaagctaataataaaaaataaatatatttttaaaaatggaaagattttatctgctggtttatattttatggaaatttatgctagaattaaagataataagttaaactattaataatatggggagaaaaaaatgaaaggatttaaacgaaataatcaattattatctttgtgcggtttgaactgtggtttgtgtccgatgcatattgatggttactgtccaggatgtggtggtggagcaggaaatcaaagttgtaggattgctcgttgtagtttggaacatgataatctcacatattgttatgaatgttcatcatatccttgtgataaatacatgaaatttgctaaatatgattcatttattacacatcaacattatcatcaagatttaatgaaagctaaagatggtggtatagacacatataatcaagagcagcttgaaaagatagatattttaaaaatatttttagaaaaatataatgatggacgaaaaaagagtttttattgtcttgctgtaaatcttttagagttagaagaacttaaaagtctaattaaacagatagaaactaattcaaagctgtcagctctaacaaaaaaagagcaagctaaatatgtatttgatttatttcaagatttagccaaacaacatagcttaatcttgaaattaaataagaagagtaaaaaataatttacccgtaagattagcaagagtaactaatttacgggtatttttattgtacaatcgaagcatcatattgaattgtttgtaataaagctttacaagtattaataaattcatccttattcatgcctttaacaattgcttcactagctagtaactctagctcatcaagtaatttttcttgatgttcatgagaattatcaatcgttggttgaactttagcaccatgacggcgatcaatacaaatatagccttcttgttttagcagcccataagctttattaacggtcatattatttacttgaagatcttgagctaaagtcctaacggttggtaatgactcgccgtatttaaattgaccgttagcaatacctttaacaatttcattacgtagttgcaaataaattggaatttcacttgtatagtctagattaataatcattggctaagcacctcctgaatttcttgatagatgagtttagtattttgaatatcatcatcattaacgatataggttatatcatcagtatacaaaattatatagcaaggatgcaaacttgccatgtatactttacacttaccataacggtcaaaagtataatttcccttaccataaacaaaagtatcggttccattagttctaattcctttacctaaatcatcggctaattctgctttattaactttttgaagatcaattgaaacatcgtagaaaggactatcaacaactactgcttgatcggttaaagaaagattgacaagattattagttatatctaaataatacggatatccaaataaccatagcaataaagcaataacaaatgtccaaataccaataataaaaattcgataagccggttttgcagtattaaatgtcatctgtgttccatttggcgctgaaataagtgtacgtggatcagctttattataatacgttggaccaaaccaaccgattttccagcaatcatcattactgatggtatattcacattcgttgtaatgagcgagaatctttgcctttttctctcgataatggttagctttaatgacaatgataattacacaaagaatcattattaaggcaactaaaaggagtattacaaaaggtagcttttcaagtaagaaaaattgtaaagctaagttaaaaatactatcaccagtgattaaaaagaaaaaacaatgatgaaaagaatcacgacgtagtaaattcaatgttatatttacttcactgtttttacagaatgttttatttggtaattttttaataaagacaattccaagtactaagaccataaattgtaataccatgtaaagatacatggcattttcagcgtggaaataaatcatatttcctaatacagatagatcaattattaaaacgaagaagtaacgtcttaaattaaaagggtgtttttccatataggctgataatgataaatcaattttaattttctctattttttcatctggccaattgcgcaatttttttaaagctaataatttagcacgtgcttttctatacggaacataatagacggaaacgttaaaccatatcacaatcataaaataaagtaatagccatttagttgaaaaaataaataaaggaataaatgttataaatgagataataaatacccataaatgttcttttttaaactgtttctcaatttctttaatttcaacagattcataagcccaatcagggattgtaactaaaaataagcgtccttcattataacgactctctcgtttagaagaaaagtacattactacattaataaaaactaaacataaaattaaaatccacatattactcacctcttatatttgtattatataacataatacaaataatacaaaataaaataataaaatattataacatattttgctgaaaatgattcgcaacaaaaagcagaatcgattcgattctgccaggttgataattattcagctgtttctaaaccttgttttttagcagctttattagaagctgatacaagtggtgcataaactaagagtccaattatggttataacgatctgtgagggcgtaccccgtatatcaccagtagatagataaccagaaagtaagggggggagttacccatgggataacaatataagtatgtcctactaagccaactgcagttgcaaaatatgctattaaagttgaaacaaatagaaacaatacagaaaggaacagtataaatagggttgaaaacgacaggaagtccaaacataattggttcactgatattgaagatacttgagacctcacccaaacgggcaatcactttttcttgaaaagataaatacggtaacaactaagattaataaaatcattaagaaaaatgaaacttttgtaagtcagtataatgatgattttaaagatgcggttcgtttcagtgttattgattatggcgcaacagtaggaacagctaaagagatggaaacaaaattttctgaaacaattagggttgcaagtcaaggttataagttagaggcttatatgcatggaccatatttggaagtcaatccagaacatcgaattttctttatcgaaacgccaagtccaagattatctaaagcaaaactattaaaagcctatgaataacagtatacggagcacgtgtttgctattacgaaagcacaatcaataagaccttagcattagatattgctttagatgagtatcaggctgcatatttactaattattcttttccaagtaatgacgtggtgtattgctaaaagtaaagaaattgatttgacgaaatggatttatacagatttttctcaagcggtcaagagtaaaacggctgtttaagattatgtctagaaaggcttgtcaaaaatatttgacaacattcctaatatctttggtagcattattttgatggtttatttatactattaattataggaggaaagcagatgttaggcgaaaaattaatgcgattaagaaaaaaacagggctatagtcaacaagaggttgcagataagttatcagtgagtagacaaactatttctaactgggaatgtgatcaagccttacccgcagttgataaagccatggaattggcacagttatataatataagtttagatgatttaatggaaaatgagattgaaatagttagtaataataaaactaaagacctacatcttttacaatatttgatcggaaaaacttgtacgctggagtgcacacgagatgcctatttgttagatatatctacaagtgatggaaaggttctaattgttgatgtcaatgatgattgggttaaagtgcagtatcatcgaacaaaaaaaggttcgtttataaaaaaagaaactgttaccaaactaattgatctatcatgtattagcggctttaaggtcgagggggaattataatgacgactattattgcaattattgctttagttataagtatttgtgcaatatatgagattgaaaaactaaagaaaaatgatgttaaaaatattgaaaaagaaattaaggaaacagatcgaattaagaatattttagcaggattaaagcagtgtgattgcgaattgattgtaaaagaaaccatgtttttgattgatgtcccatatagtgtagaaggtaaaatcattgatttagatgatgattgggttttaattgttagtatgggaagaaagacgattagtagaatgattaggataaccatgattaaagatgtaatagaattgactaagtagacaactaagattgtctttttaattgtaaactaattttaaataattaatttacaatttagtgaatgtttgctatgcttaaaaacgaggtgattcaatgagtgtaaaacaaaatgtaattgctttacttgaagaaaatcgtagtaaggtaatatccggacaagagttagccaaccaattgtatgttagtcgtgcggcaatttggaaagcgataaagacattaaaagaagagggatataatattgaagcaacgccaaataaaggatatgtattattagaaaatagtgatgttttatcaaaacaaggaattgcatattatttaactgaagaaattgatatcttttcatataaaacaatcgattcaaccaatacacaaatgaagaaattagcaataaatggtggtaaaaatcatagtgtaattgtgtctgaagaacaaagcgccggacgtggtagatttggacgaagtttttattcaccggctcaaaaaggggtttatatgagtgttttattaaaaacaggagattcgctacaaaatgcaactatgattacaattaaaacagcagttgcggttaggcgagcaattgcaaagctatatgatattgaagtagcaattaagtgggttaatgatttgtattatcgtgggaagaaggtttgtggtattttaagtgaggcaattagtgattttgaaagcggaatgatcgaagcaattattattggaattggaattaatgtatcaactgataattttccattagaaatagcttccatagctacttctctaggattacaagaagctaatcgtaatcaatttattgcagaaatcttaaatcagctatttgcaattatcgatgaggattttaaattggttttgaatgaatatcgcatggcttcatgtgtattgcataagcaaataacttttaatcaaaagggggaacagtttaccggtttagttcgtgaaattaatgatttaggtaatttggtcgttagtagcaatggtgcagaaatggtattaaccgcgggtgaagtaagtattataggaggaaaccatggagcagaataagttactaacaacaaagaaaataacctattgtgcaatttttacggctctaattacaatcggagcatttatacagattccggtacctttcatggattattttacattacaatttttctttgttttgctagctggaattttattaggctcaaaattaggagcattggcagtattactgtatgttgtaattggattactaggattaccaatatttgcggccggtggaggtttagcgtatattgttagacctagttttggttatttaattggttttattgcaggagcgtatgttacaggcataatatgtgaaaaaactaatgaaatagcagcaaaaaaatatgttttggcagtattgagtggtcttttggccacttatatgattggacttggctataaatatatcattttgaattactatactggaactccaataacttggaaactagttttgctctcatgttttcctttagatttaccaggtgacttatttttaagttttttagcagtcgggacaggaattagatttgaaaagatttttaaaaagaggagaatacaatgttagagaagctcattgcacaaattatggctggttatgaaattagtaaagcagaagctaagatgctgatagattatgatctagggactttaaagcaaggggctgaactaattagaagaagctattgtggtagtacatttgatctttgttcaattattaatggtaaaagcgggcggtgtagtgagaattgtaaatattgtgctcaatcagtttattatcaaactggaattgatatttatagtttgttgaaaattagtgaaattaaagcaatagccctacataatcaaaagcaaggtgtcgaacgtttttctattgtgacatccggacggaaattaaatgttcaagaatttaataaaattttaaaaatatatcaagaacttaatgatactacaacgatatccttatgtgcttcactaggactattaaactttgaagagttaaaaaaacttaaagaaacaggcgttaaaagatatcataataatttggaaacatcacgtaactactttaataatgtttgtactactcatagttacgagcaaaaaatcaaaacaattaaggctgcaaaattagcaggtttggaggtttgtagtggcggaattgtaggaatgggagaatcatggcttgatcgacttgatctagcttttgaattaaaagacttaggaataaagtcggttccaatcaatgttcttaatccaattagaggaacacctttagaacatttgaaaccattatcaaaagaagatgttgaaagaatatttgccatttttcgttttattcttcctgatgcaacgattagaatggctggtggtagagggctttttgatgataaaggaataaatgtatttaaaagtggtgctaatggcgctatcactggagatatgcttacaactcagggaataactattgctgaagatcaaagaatcattaagcaattgggatttagggtagccaagccatgattaaaggtttgtttgttactggaacagggacagatgttggaaagacatatgtaagtgcaagaatagttaaagccttgaaatcacagtataaggttggttattataaggcggccttaagtggtgccgttgttgaaaatgatgtactgataccaggtgatttagaagttgttaagcagtatgcaagtctgccaaatgaaagctgtaaagtatcttttgtttatgaagaagcatttgcgcctcatctagctgcaaaaaagactaatacaccagttgatttaaatactataaaagcagatttgacagatttagaaaataagcatgattttgttgttattgaaggaagtggtggtattgtttgtccactgcgcgatgataaattgataatgcttagtgatgtgatgttactggctaactatccgctaataattgtaacatcatcaggcttgggtagtattaatggagcagttttaacggctcaatatgctaaacagttaaatttaaatgtacttggttttattatgaataattttgatagtaacaatctccttcatcaagataatcgaataatgattgaaagattaagtagttataaagttttagggtatttaaacaaaaaagctgataagattgaatggtttgaacaaattatagaaagttaagataaaaaagtgaaatatacctcggtatttaatacttaatatctaataaacgggagatatttcaaattcacttttaattataaataatcggttcctatctactttagcggagttatatcaatatgtagttacagtttttttcatgttaacattattggcgaaatgttaacggattgatatagacgaaaaaagacaaaatatctatgatatagataggagggatgggttatgagcattggtaaaaaactactaagcctaaggcaagaaaaagggatttcacaagaagctttgggccgtgaattaaatgtatcaaggcaaacagtgtctaaatgggaaagtgatttaagtttaccagacatgaaaatgatgataacaataagtcaattttatgaaataagtattacccaattattagatcttgatgatgaaacagaagctgattcaatcaataagatatatgaacaaacatcattagtgttagagaatctacaaaaggaaaataaaaaaaagattattcgtgattggataattattattatttgtactctttgtttatgtgttgcattagcaatactagttaaaaagggaactaatgaggtagttttttatcctaataatagtacaacaccaataaccgataacaatatagtagattattcaaatacaacatttaaagtgattagttatgactttgataaa

SEQ ID NO: 221 - DNA, 512694 bp, Thomasclavelia ramosa
  source 1..512694: mol_type = genomic DNA
tagttcttttttataaataatttcaataattgttgctcgtgacgtaaggtcatgaactataatgtttatagaggtgatgatatgaatgaggactacttaacaattggagaattagcacaaaagatggatgtaacagttcgtacactacaatattatgatcgtgaggggttgttgaagccagcagcaattagcaaagggggaagacggctctattcaactaaagatattgttaaattgcatcaaattttatcatttaaatatcttggtttttcacttgtagaaattaaaactaaattatttaatctcgacacaccacaggaagttgcagcgattttaaatcaacaaaaaagtgtgattcaagaacaaattgctaacttatcagaagctttagaagcaacgattgccttatctcgagaagttcaagaaatgaatacggtagattttaaaaaatatgctgaaataatagagttacttcgtttgggaaataaagaatattgggtgtggaaacattttgataatacaattactgatcatattaaagaacgatttggtgatgatcaagaggccgggttaagaatatttagcacttatcaagaagtcttagataagctgtatgtgttaaagaaacagggggtaagtcctgatagtccagaatgctttatgattgccaaacagtggtgggaaatgattttagaatttactggaggtaatttagaactgttgccagagttacaaaaatttaatgataaaaaggacgattggaataatgatctggcagttaaacaaaaagaagtagataattatctaactgcggctctagaatattattttaagaggatccaaaaggagcaagagtaatatggatattgcattgcagatcaataatcttggtaaggcttatggtaaacatcaggttttagaaaatattagttttactgttgttaaaggggaaatatttgctttacttggcacaaacggtgcggggaaaacaacgacattagaatgtttagaggggattcgacgatacgatacaggtaaaattttaataaatggtaagctgggggttcaactgcaatcatcatcattaccagcggatattaccgctaaagaagcaatcatgttatttgcaaaatggcaagatcttgaggtgactgacgattattttatttatttaggaattaaagcttttctaaaaaagcaatatcaccagttatcgacaggacaaaagcgtcgtttacatcttgcaattgcgctattaggacaccccgatattattgtacttgatgagccaactgctggacttgatgttgagggacgtaacagtatccaccaggaaattaaacgactaaaaacccaaggtaaaacaattttattagcgagtcatgatatgaccgaggttgaagagttgtgtgatcgaatcggagtattaaatcatgggaaaattgtttttattggggctcctgatcaattgcatcaaacaatgcaaagtaaatttaaattaaaggttcgtttttcaaaggtgccccgattaaatgagcagtttgaaatagtttctcaggaacaggagtattatatctttgagactacaaacttagagataacattaaaagcaattattcaattaaccgaggaacaaagtattaaaattatggaaataaatactgttcagccaaagctggaagaaagatttttaaaagaggtgcaatcatgagggctttcatctatcaaattggattaaactggaaattaaatcttcgcagtaaagaattattagttcattattatgtggttcccttagtcttttatttgtttattgggggggtttttatatcgattttgcccgatgctgataaaacgataattcaagtaatgagtgtttttgctattaccatgggtggagtcttaggttctccatatccgttagtggaattttatcatagtgacataaaaaaggcttatcaggtaggaaagattcctttatggacgattgccgcaagtaattttatttctgggattatgcatttatttgtgatgagtttgataattttaataagtgccccgattatttttaaagcacaaatacctgaaaatatttttatatatttattgggggtgattttatttatcatagttagtttgagtattgggatggtttttggtgtatttttcaaaagtgcggcgaaaatgggaatggcaacgcaactggtttttttaccgtcgatcatgttatcaggaataatgttccctgtagcaatgctccctaacgtattacaggtgataggcagaattttaccggccacatggggatttgaattaatgtgtacaaatgattttttgtggcttaatgtggctgttcagttaataatttttatgataatgctaattgtagcaagtttcaagatcaagcagataagaaaagaagattaaaaaagcctaaattagtacaagctgatttagtgctttttattgtttaaactgttgatcaatcacattgttaaaactattggtaatgaagtctttagttaatccttttgaataacgattatgactcttttctaatttttcattatatttatctataggcaccaatttaaaattttcaaatttttgatcataatagttgatgactgggagagaattaatatttttaattatggtagaattattattcttttcaaaagttatttgcaggatcattgaaacattatatgcattggcaaattctggtgttgctctagttacctgattatcagctgaaataaatgatcctaatgaatatacaacaagtgttttatggttggtagtttctaaccattcaattggctgaatacaatgtgaatgatgaccgataatgacatcaacccctaattcgtttagataattagctaattctttttgttcactattgacagcatatgtaaactcattgccccaatgaacactaacgataactatatcactaagctgttttgcttgtgcaacttcttgttttatgatttctttatgagcattatcgagtttcatagtgtcaaggttgcgataataaccaatcagttctctgttttgattatcaggcttattagttttataagtgtagccaagaaaactgaaggttatatcatttatggtttttgtagggatttgtgttcggacttcttttgattcatagattccggttgttagaatctggtgttttttaaagaagcttaatgtattgatacgtccttgaggacccgcgtcgttagcatgattattagcaagattaacagcatcgacacccatagcgataacttgattaccaatttcctcaggagcattaaaactataaccagttccggatactcctaatcctttgccgccgatagggacttccatattggctaatgttagatcgtcatttaaaaaatatggttttactaagtcataatagcctttatcattgtaacttgttccaatccaatcatagtatggctgttcatataataaatcgccgataaaagatgcattaactattcttggccttttagtagaagtggatttgtttggtgatttgattgatgtttcttttctattgataaataaatacgtccccgttacgagggataaaagcaggagaaaattaagaaatattttaattggacgttttagttttaattttttctttgacatttttatcaccctttatattgtaacatgatcaatcatgctaattgtcttaaataagctgaaaaatctttgcatattcttaagataaattatagaagatttggtagttagatttatttagtttagtagaatgtatgcaaggacattgaggaggaatgaaagatgactaatgagattaagctggaagttacctgtgttcattgcttaggggttggggaaaaacagttatatccaataattaatagacaagatttagaggcaaaacagaatatttttgaagaagatttgtttttatatcgttgtccgcattgtggacattatcaaaggatttcgtatgaatgtatgtattatgatgagaaattaaaatatgcggtggtgttgagccatgatggacaccgttttttaaagaaagtgaaaatagatttaaccgcttatcaacttcgttttgtaaaaagtgtaagtgaattaaaagaaaaaatcgttattaaagaaaatggtttagatgatcgaattgttgagataatgaaacataatattcaaactactttaaggagcaaagcgtcttatcaattggtattaagagatggacaaggactagagtttgttttattatatccagataatgaagttattaagatatttatgtttaataagcaagattatttgactttaacaaagaagtataatcgttgtttggctaatgattatatagtagataggctctttgcttctagaacggttttacgtctaaataagttcaataatttgaaactaaattgtcattagaataaatagatgatattggtaaaatacttgataaaatcaggacttttatattgaatcgacttgtgaaataattaattattaatcagataattaattatctataaaatttatgaaaaagggttgacttcgacaaaattacgggctattatattcagtaacataacttaaatactttgataggaactagtaaataaatttatcgagcatagagagattctgggtggtgaaaagaattgttgatgatttgttgaactcatccttgagtggagcgctgaatcaagtaggtggctacggagtgcaaccgttatctagcaaaagtatgaactatatataatagcgtacttggtgagattaatatcgtgaggtattaataaattgaggtggaaccacggggttactatactctcgtcctcaaaatgacatagtctgtcattttgagtgcgagagtttttttataagtatttattatgcaaaagggaggaagaaaaaatgatgaattatcaaaagtataagagatttgaaccaatcaactttaaagaacgtacttggccggataaacaaattgaaaaagcgccaacttgggtctctgtagatttacgtgatggcaatcaggcgttgattacccctatgaaaatcgaagaaaaagtcgaaatgtttcaacttttagttgatatggggtttaaagaaatagaagttggttttccttcttctagtcaaattgaatatgattttttaagaattttgattgatgaaaatttaattcctgatgatgtgactgttcaagttctaactcaagcacgtgaacatttaattagaaagacttttgaatcattaaaaggattaaagagagcaatcgttcatgtttataattcaacttcagtattacaacgtgatgtcgtctttaatcgaagtaaagaagaaattaaacagattgcagtcgatggtgttaaattagtcaaagaattaagtagagaatttgatggggaagtaattcttgaatattcaccagaaagttttactggaactgaactggaatatgccttagaagtttgtgaagcggtgatggatgaatggggcgctactaaagataataaagtaattatcaatttaccgtcaacagtagaaatggcaacacctaatgtgtatgctgatcaaattgaatggatgtgtactcactttagtgatcgtgatcgtgtcattgtatcgttgcatactcacaatgatcgtggttgtggtgtagcggctactgaattaggaattatggcaggagctgatcgtgttgaaggaacactatttggtaatggtgaaagaacaggaaatcttgatattgtcgtagtagccttaaatatgtttacccaaggaattgatccaaaactagatatgagcaatatcaataatataaaacatgtttatgaaaaagtaacgaaaatggaaatcccacctcgtcaaccatatgtaggaaagttagtgtttaccgcattttcaggtagtcaccaagatgcaattaataaaggaactcatgcaatgcatgaacgtgacagtcaaatttgggaagtaccttatttgccgattgatcctagtgatctaggccgccaatatgaaccgattgtgcgtattaattcacaatctggtaaaggtggtgtagcatatgtaatggaaagtatgtatggtttccatttaccaaaaggattacaagtagattttgctaaagtaattcaagatataagtgaagaagaaggagaagtttctccagaaagagtctacgatacattcattgaagaatatgtagatattgatgaaccttatcgctttattaaacaaaagctgattgatataagtgaagatgatagtgagtttgaacgtcgtgctgagattacgattgaggcgcatggtgaagttacaactttaacaggatatggtaatggaccaatcgatgctgttaaaaatgctttaaactcacttccagaaatgcattcacacttattagattatagtgaacatgcattaacttcaggatcaagctcaaaagcagcggcttatgtttatttaagagctaagggaagtgctagacaagaatacggagtggggattcatccaaatattacaactgcaactgtaaaagcgataatatctggaatgaatcgtctgtataagacgctaaaataagtggaaaggagccgaacatgaatcgtttagtattatcgttattagtggaaaataacccaggtgtattaagcagagtggctggtttatttagtcgtcgtggttatggaattgaaagtttaagcgttggcaagaccaatgaacctaatgtttcacgcatgacggttgtggctgttggtgatgaattgattttaaatcaaattgaaaaacagttaggtaaactagtcgaagtaattgaaattttcccattgaaaccggaagaatcggtataccgggaattagttttagttaaagttgaggctgatgaaaaacaacgttcgtcacttgtttccattgccgatatctttagagcacggattattgatgttgcaccagcatcattagtaatcgaggtaacaggagatcagtcaaagattgatggactgcttgccatgttagaaggtttcaatgttgttgagatggttagaaccggattatctggtatcaaacgtggtcttggcgaaattgatatagaaagtcataacaaatagaaatagggggattagaaaaaatggctaaaattttttatgaatcagattgtgatttatctttattagacggtaaaactgttgccgtgatcgggtatggttctcaaggacatgctcatgcattaaatatgaaagaatcaggagtaaacgtaattatcggtttatatgaaggttctaaatcttggaaaaaagctgaagaacaaggttttgaagtttatacttctgctgaagcagctaaaaaagctgacatcatcatgattttgatcaatgatgaattacaagctaaattatacaaagaatcaattgaaccaaacttagaagaaggaaatatgttaatgtttgctcatggtttcaatattcattttggacaaatcgtaccacctaagaatgttgatgtaactatggttgcaccaaaaggacctggacatacagtacgtagtgagtaccaagttggtaaaggtgtaccttgcttagtcgctgttgaacaagatgctactggtcgtgctcaagatgttgctttagcatatgctttagctatcggtggagcaagagctggagttcttgaaactgattttagaacagaaacagaaactgatttatttggtgaacaagcagtattatgtggtggagtttgtgctttaatgcaagctggttttgaaacattagttgaagctgggtatgatccaagaaatgcttatttcgaatgtatccatgaaatgaaattaatcgttgatttaatttaccaatcaggttttgcaggaatgagatattcaatttcaaatactgctgaatatggtgattatattacaggaccaaaaattatcacagaagatactaaaaaagcaatgaaaaaggtattacaagatattcaagatggtacatttgctaaagacttcttattagatatgtctgaagctggtggacaagctcatttcaaagcaatgagaaaattagcaagcgaacatatttctgaaaaaactggggaagatgtaagaaaattatacgcttggtctgatgaagataaattaatcaataactaatttattataacaacacacttttgtgtgttgtaattaaggagtaatttcttactccctaattacaacctacaaaggtaaagataagggggaatataaaagtggcaatgacaatgacacaaaaaatattagcaaaacatgcaggattagacgcagttgtggcggggcagctaatcgaagcaaaacttgatgttgtaatggctaacgacatcacaggaccgatggcattaccaatttttcatcaaatggctgacaaagtctttgataaagataaggtgattttagttcctgatcattttacaccaaataaagatattaagtcggctgaaaactctaaagcaattttagatttttcaaatgatcaatgtttaactcatcatatggaacaaggtaaatgtggggttgaacatgcaattttaccagaaaaaggaattgttgtcgctggtgaatgtatcattggggctgattcacatacatgtacttatggcgctttaggagctttttcaactggtgttggaactactgatattgcaacaggaatggcaactggtgaattatggtttaaagtgcctagtgcaatcaaatttgtcttaaccggaaagcctagtcaatttgttagtggtaaagatattattttggatattattactcgtattggagttgatggggcccgttataaaagtatggaatttgttggtgaaggaattcaacacttaacaatggatgatcgttttacgatttgtaatatggcaattgaagctggggctaaaaacgggatttttcctgttgatgagcaaacgattgcttatatggaaaaacactcagtgaaagaatatgctgtctatgaagctgatgaggatgctgaatatgatgaagtgattgaaatagatttaggtaaagttagaccaacagtagctttcccacatttaccagggaatgggcatacgattgatgaaattgaagcaatggataagattatgatcgatcaagtcgtaattggttcatgtacgaatgggcgtttgtctgatttacgtaaagcggcagcaatccttaagggaaaacaagtagctaaaaatgttcgtgtaatggttgttccagcgactcagaaaatctttgttcaatgtattcatgaaggtttagcagaaatttttgttgaagctggatgtgcatttaataccccaagctgtggaccttgtatgggtggacatatgggagttatggctaaaggtgaaaagtgtgtttctacaactaaccgcaattttgttggtcgaatgggcgacacagaagcgttaatttacttagcttctccagaagtagcagccgcaagtgcaattgcgggatatattgcaaatcctgaaaaagtaggtgaagaataatgaaaatatataaatatggtgataatgttgatacggatgtaattattccagcacgttatttaaattcatttgatgctaaagaattagctagtcatgcgatggtggatattgatcctgattttgctaaaacggttgaatcgggtgatattattgttgctggaaaaaattttggttgcggttcttcaagagaacatgctccgctatgtttaaaaacagcaggaactaaatgcgtcattgcagaaagttttgctcgtattttctatcgtaattcaattaatattggatttccaatcatggaatgtccagaagcagtagcaggaattaatcaaggtgatgaagttacagtagattttaccactggtttaattactaatattacaaaaggtgaaacttatcaaagtcaacctttcccagagttcttacaaaagatgattgaattagatggtttagtcaactatgttaatagtaaaaaggggtaaggataatggaaaaaaatattgctgtaataaaaggtgatggaatcggaccggaaattgtaactgaagcgatgaaagttttagatgctatcgctgataaatataatcataaatttaattatactcaaattttaatgggtggtgcttcaatcgatgttcatggcgttcctctaactgatgaggcgttggcgattgctaaaaatagtgatagtgttttacttgggtcaattggtggtgataccacaacatcaccttggtataaattagaacctaatcttcgtcctgaagcggggttattgaaaattcgtaaagagttaggattgtttgctaatttaagaccggcggtcttatatgatgaattaaagggtgcttgtcctttgaaggaagaattaactgagggtgggtttgacatgatgatcatgcgtgaacttaccggtgggttatattttggtgaacgttcaacgaaagaagaaaatggtgaattagtggctcgagatgcaatgagttatagtgagactgaaattagaagaattgctaaaagagcgtttgatattgccatgaaacgtaataaaaaagtcacgagtgttgataaagctaatgttattgatacttcaagattatggcgtaaagttgtaagtgaagttgcaaaagattatcctgaagttgtgctggagcatatgttagttgataactgtgcaatgcaactggtaaaggatccaaaacaatttgatgttattttgacggagaatatgtttggggatattctaagtgatgaagctagtatggtaacaggttcgattgggatgctggcaagtgcatcactacgtgttgataaatttggaatgtacgaaccaagtcatggtagtgcgcctgatattgctggtaaaaatattgctaatccaattgctactattttatcagctgcaatgatgcttcgttattcgtttgatctagatgatgaagcgaaagtgattgaaaatgcaattgaaaaagtattacaacaaggatatcgaacaagtgatatcatgtcagataataaaactttagtaggaactaaagaaatgggtgacttaattgttgcaaatttataagggggatagaaaatgaaaagtgataatgtaaaaaaagggatgcagcaggcaccacatcgatcattatttaatgctttaggtttaactgaagaagagatggataaaccgttaattggaattgttagttcatataatgaaattgtccctggacatatgaatcttgataaaatcgttgaagcagtaaaaatgggagtagccctagcgggtggagtacctagagaattcccggctattgcggtatgtgatggaattgctatgggacatattggaatgaagtattcgttagtaactagagatttaattgctgatagtactgaagcaatggctttagctcatcaatttgatgctttagttatggtacccaactgcgataaaaatgtaccaggattattgatggcggctgcaaggatcaatataccaactatctttgtttctgggggaccaatgttagctggacgcgtacatggtaaaaaaactagtttatcatcaatgtttgaagcggtaggaagctatagtgcaggtaaaattgatgaggaagaagttcgttattatgaaaatcatgcttgtccaacatgtggttcatgttctgggatgtatacggctaattcaatgaactgtctgactgaagtgttaggaatggggcttcgtgggaatgggactattcctgctgtctattctgaaagaattaaattagctaaacatgcgggaatgcaaattatggaattgttaaagaaagacattcgtcctcgtgatattatcactaaagaatcaatgatgaatgctttaacgatggatatggcgttgggatgttcaactaattcaatgttacatttgccagctattgctcatgaaattggttttgatttcaatataaagtttgctaatgaaataagtgaaaaaacacctaatctttgccatttggcgccagctggacctacttatatggaagacttgaacgaagcaggcggtatttatgcagtaatgaaagaaatcagtaaattaaatttattgaatcttgattgtatgactgttaccggtaaaacagtaggtgaaaatattaaagatgcagttaactttgatcctgaagtaattcgaacaattgaaaatccatatagtaaaacaggcggattagctgttttatcgggaaatttagcgcctgatggtagtgtagtaaaacgctcagcagttgtgccggaaatgatggaacatagtggtcctgcaagggtctttgattgtgaagaagatgcgattgaagcaattaaaggtggtaagatcgtagcgggagacgttgttgtgattcgttacgaaggacctaagggtgggcctggaatgcgcgaaatgttgaatccaacctctgcaattgccggaatgggcttaggatcaacagtagccttaattactgatggtcgattctcaggggcatctcgtggagcttcgattggacatgtttcacctgaagcggcagtaggtggaccgattgctttagttgaagaaggcgatattatagaaattaatattcctgaatataaaatcaatttaaaaatttctgatgaagaaatggcaaaacgtaaagctaaatggcagccaagagaaccaaaagtaacgactggttacctagcgagatatgcggcaatggtaacttcaggtgatcgtggtgctattttagaagtacaaaaaaataagtagagggaggtatttaaatgttattaacaggttcccaaattgttgctgaatgtttaattgaacaaggtgttgatacagtgtttggttatccaggtggaacaattctaaatatttatgatgctttataccaatatcaagataagattcatcatatcttaacatctcacgaacaaggtgcggcccatgctgctgacggctatgcgcgctcaacaggaaaggttggagtgtgtatggcgacttctgggccgggagctacgaatctggttacagggattgctacggcttacatggattcaacgccattagttgcaattactgctaatgttgcagtatcgctgcttgggcgtgacagcttccaagaaattgatatcgctggagttactatgccaattactaaacataattttattgttaaagatattaaagatttggcaccaacgatccgtaaagcctttcatattgcgagcgaaggtcgtcctgggccggtattagtggatataactaaggatgttacagcggctaaatttgattttgagccaattgttccagaagtgatcgaaccacgtaaatatacttatggtgctcaagaattagatcaagctatcaagatgattgaagcaagtgaaaaaccatttatttttgttggtggtggggcaatcgctagtgatgcggccagcgaattgaaagaatttgcagaaaaaattgatgctcctgttacggattctttaatgggtaaaggcgcatatgataatacccgtcctcgttatacgggaatgttagggatgcatggaacaaaagcctcaaattttggggttagtcaatgtgatttattgattgttgtaggggcccggttctctgatcgagttactggagatacaaatcgttttgctaaagatgcaaagattatccatattgatgttgatgctgctgaaattaataaaaatgttgttgttgatttagggatcgttggtgatgctaaaaatgtacttaaagaacttaatgaaaaattaacacgtcaaaatcatcctcaatggttaaaagaaattcgtgatttaaaagaacgttatcctttaagttatgatgatgaaggtttaacaggtccttatgtaattgaacaaattgattatctcactaatagtgaagcaataatttgtactgatgttggacaacatcaaatgtgggcggctcaatactttaattatcgtcgccctcgtcaatttatttcttcaggtggtgctggaaccatgggatttggtttaggagcagcaatgggagcaaaattagctaatccccaccaaactgtctttaatattgctggagacggatgttttagaatgaatttaaatgaattagcaactctaagccgttataatattccagtaattcaagtcgttatgaataatcaagttttaggaatggttcgtcaatggcaaacattgttctatggacaacgttattccaacacaattctcgaagataaagttgatttttgtaaagttgctgaaggtttaggttgtaaagcaattaaagttacaactaaagaagaagttgcttcagcaatcaaaattgcaatggagcatgacggtcctgtagtgattgaatgtatgattggtaaagatgataaagtattcccgatggttgctccaggtggtgcaattgcggaagcttttgacgatactgatttaaagaataagcaataggtagtaatttttaattactatctttttgtttttttaaaagtatttattataatatgcattgaaaatctaaatatcaagtgtaataattgaaatataggataaggttataaggaggcaagacaatgcaaaacgtatacaaatgtgtctatgattatgatgatcagcaaatagacaggttaacaaaaaacggtagtagtattcttggattattcaaggtgattgtggagactgagcgttttgtattaatgccggttaatcatctaaatgctaaagataggagcgtttattttaatgagattgaaaaagtaaagatgactttatccacaggtgcagcaacacgaatcactattaatcgtgcgacaatttatcaaattgatttaaatatttattttcatgatggttcattatttactttagaatttagaagttttcgaggggttgtatcattgataaagaaatttgcagaattacatatctatgtatatgatccgatgaatttattggagattatttcaatggatgatcgttgggcgattgaaaaatattttgcaactaaccttgagaaaattaaaaaacaatttcaagttgaagaaatgcgtaaaaaagatcgctatgttaaagcgtaatgaggaaaagggggaatataaatgaatgtagtgttaacgggtgataatacaaatattacaccatacatagtaattatggtaattgctatcgttgttatcgcaggagtgttgatttatcgcaaaaagaaacaaaaataaaaaaagaaaccgctagcgataagcggtttctaaagcttttttcaagactttaggatctttattatatggtgtgaccttacagattggtttattgattcctagtaatgtataaactgcaattcttgcggctcttacagaatattcttcggtaaagaccatatcctcagggatttctacaaattgagaaatcatcgcaaagttagtagatcctttgggaacaacatgaggtcgatcgctcatttttcgaggctggaactgggcatctacatatggcatcatacatggaatgacattgatgatgtcttttttaatttcctctttacgatcaattaaatgaagatgatatagtaattcatcaaaaatttcttctccagtacaatctttcattggttttttaatatagtcgcctaaacgatcagtgtataagccgtaagcccaaaaaattgtagtgttagcatcttgtgctttgaaatgcggttgggctgcaacgaccatcgacattagccatgatgagtctttaaaggtcattaaagcaccactaccagggatgttagttgagaattcctcaattattttaaggaatttatttcctttaaatgtcacagtaatactctcccagtttgtttctttaatgttaccaaagaatggctcaggattaccgaggtttggtttcttttgggcaaccttataccagagttcgccagaaattggtttttcaacaggtttaggagcaggagttttgtaatctcctaaggtagcactgtcagtcatacatgcattagtcataatacaaatgtcattattattgagaatgattttttcatctttgccatctttatttaagtaaagcactttaacagtaatagtatcatcatctttaaaatcaatatctgtaacagtagcgtttgttacaaagttgacatgatgactatctaagtatttcttgattggtaaaataactgactcaaattgattatatggtgttcttgttacgccggctaatgtttcgatacgtgggaattcaaaaatcatgcggttcatatagcgttttaattcaaaaacacttgaccatttttgaaaggcaaaagttgtttgccacatataccagaagttagttgtaaagaaatgaggtgcatctttaaaccattgttcaatcgtaatatcatcaagtttagattcaggagtaatcattaattttcctaaagttaagcgatcgttattatcaaagcccattgacttaacgtcaagaatttttccatgacgatcaattaaacgtgcccgagcttcagttggatgtaaatgatcaaaatctagtatttctttagttacgctttgaccaggatggtcaagtgaaggaattcgatcgaataattcccaaaaattctcataagtttcttcatttaacattcgtccgccacgacaaacaaatccatctttaattgatccggcaccatcattactaccaccaagaattttcatgccttcaaaaatatgaatatttttaccatcaacatgaccgtcttgaatcaaataggcagccgcggccatactggcaagcccgccaccaattaaataaaattgttggtttgtaatttcaacaggttttctaactgtatctttgttatcagcgtatttctttgctgcaactgctccagctccagctagaagagctgctccagttaataattttgttttagttttcatttttaatatccttctttcttctaacaaatactagtatagccagaaaaaataaaaagtatttaaacaaagatttaactttgtctaaatactagacagatataattaattgtctaattatttaataaactagcagcaaaagtttcactttgagtagcgattttttttagtccgtgtgcaagttttgcaggctcatttttcatattggtttttatccagcggagtactgttccggcaattccataagcataaaattcactaaaaaaattcttttcttgtggggaaacggttttgtttacatcaagcttagtaatcgcatcataaaaacatttctgagccagattatatagatcatgataaaaatattgttcgttggtattgatagtgctaatataaaaatctttttcttgatatattttttctaaaactgttaatagacattgatcccagttgtcaaaagtaatgatattctcgatatctgcaaataattcatcataatataaccactgtaataaatcatatttatcttggaagtgataataaaaagtttgacgatttagaccacatttattagttagatcgttaatggaaattttttcaaagtttcgatactgacaaagttcttttaaagttttagccaaagcccgtttagtgattaaagaatcagacatatagttcacctcgatgattattgtaacaaatttttatgaataaaacatttacattaataataatcttgttataataagtatataatctttcgttttattgtgacgaaaggcaaaaaaggggggagatatttggttaaaattacagaattaaaaacgaataatattcatcaagtacgattatgtttttataatggtgaaatttggactaaaaacgatttagctaaacatactggtctatcacttgcagcaacaacgaacatcttacaattattactaaaagatgatgaaattaagcttgttggagaagcgcagtcaactggtggtcgcaaatcaaaacaatatattctaaataaagattattatcatttaggtaacgtaagtttaaaaagagatgatcaatattattattttcttgttaaaattacagatttattagggaatattttaaaggaagaaaagcttattagtgaagagggttcaatcgatgaattactagaagccataagtaatttaatttgtgatgattataaagtaacagtgctagcactaagtatcccgggagtgtgtaaagatggaaaagttggaatttgtgattttgaagcgttacgaaattgtgagttgttaaagctgctgaaagagcatttcaatcttgatataataatggacaatgatgttaatgcggctagcatagggtttggaattcattatccaaatgctaacaatttagcgttaatgtatcagcctaagattaaatatgttggatgtggtattttaattaatcatcgattatgcagcggatattctaactttgcgggtgaactatcatatttgccgtttatgagccatcatgagcaagatgaaatgttgtttaaagctccaaatgatttactattaaaacaattagcaacgatttgttgtgttatcaatccggaaattattggtgtttgcagtgatgtatttaaagagtttgattcgagtcaattaattaattatttacccgcagaacattggcctaaaattattgatatcgataatttagatcaattaattaaagatggattgtatagtttaggaattgaagtattaaaaaataaaatgcgaaagagagatagataaatggaaaagtatattgatttacacatgcattcaaaatatagtgatgatggtgaatttactccgactcaattagttgaacaatgccacaaagcaggaattaaggttatggcaattgctgatcataatagtgttaaagcgattgatgaagcgaaagaagcagcagctaaattaaatattaaatatattcctagtgtcgaaattgactgtacttataagggaatcaacctacatgttttaggttatggggttgattatcatcatgcggatttcgtgacgttagaagaaaatgtattgaaccaagaactagcatgttcaaaagaaaaggtaaaattaacaaatatgttaggttttgatgttgatcaagcagcgttagatgctttaagtgataatggtgtttatacgggggaaatgtttggtgaagtattattaaatgatcaacgttataatgaaaattctttattaaaaccatatcgtagcgggggagaacgtagcgataatccatatgttaatttttattgggatttctatgctcaagggaaaccatgttatacagaaatagtttatccgactttaaaagaaacgattgatttaatcaagaggcatggaggaacagttgttttagctcatcctgggaataatttaaaaggtaaatttgagatttttgatgagatggtggaattaggtgtagaaggggttgaagcttttagtaattatcatagtcctgaaacagttgaatatttctatcaagcaggaaaaaaacatcagattttgattacatgtggtagtgattatcatggtaaaactaagccggcaattgagcttggtgaatgtcgctgtacgatcgatgaacatgatattgaaaatcaattaaaagaatataaattaatctaattataagagcgtagtggagcgctctttttttatcaaaaataaattataattgttctttaattgatacaatcactgtgctataatcggggcgtataaaaggggatcagtaacatggatataaaaaagaagaaatgcttgattagctttggtgctgtgtttttatcatcgttaatcatggcttttgcaacaaaaaatttagttcggccagccgggattttatcaggcggatttatgggaatcgcaataatgatcgatatgattgctgaactaatcgggcacaatatacctacttcaattggcttattgtgtttaaatatcccagtagctttattttgtgcaaaaaaaatatcaccacgatttgttttcttttcgcttttgcaggttggtctgacatcgttgtttttaccattgatgccacaagttccattatttgatgacaagatattaaatgttatttttggtggatttatgtttggcggaagtattgtaattgctttgaaaggtaatgcttcaagtggtggaaccgattttatagcattgtatgtttccaataagagcggaaaggaaatctggaatcaagtgttcatttttaatacaataatgttgtgtgtatttggatatatttttggttttgaggcagcaggatattcaattttattccaatttatgtcaacaaaaacagtttctaattttcatacccgttataaacgtgtaatgatgcagattttcacaaaaaacaaagatgatgttatggcaatatattgcaaaaattttcatcatgggattacagctttagatggaatgggtggatattctaagacgccggtttctatgttaacggcaattgtttcaagttatgaggttgatgatgttgttactgctttaaaagaagttgaccccaagataattattaatgtaagtaagtcagaaaaatatgttggtcgtttttacaatgcaccattataaaaataatcccgttagtttaactggcgggattatttggtattagtattttgacaataaagtaaccttcatcttcttcgaatttaattaaaccttggtaatggttgactaatagtcgtacgttattaataccaattccatgatgctcagagtcaactttagttgtatttaaatctggattagcagctagaacactatctttgatactgtttttaatactaataaaataatactctggttttgtcccgatagaaacccaaagttgtttattgaaatttgaatcgcaattttcaattgcgttgtcaattaagtttcccacaataataaagaaatgggcatcttccagtggaccaatggtattatgacaactagttataagatgaatctctttatcctttatttgattaactttttgtaataataaataatctaataattcatttccagaagattgaacaaagttattgctatttaaattatgattatattcattgatgattttaaaagcttcattataatttttattagttagttggtattttatggcattaaagacatggataatatcatgtttccaatttcttagttgttgataattattttcattgatactttgaatagtttctaagttttcaattttcatactttttcgttgtaattcgagaatacgatattgttcgcgctgggcctcaaagaatacaaaacaaagacagattgttagggcatcaataagcaataatagcaatgttagagtggaattaagattatccccataaaatatgtaatcaacagtaacgctgtaaataaagtttaataaaacaattgaaattgtaatatatttaagtacttgactttctaaaaaataatactttttaatatgactggctgttgcaagtacgagaacaagtaagattggttttgaaatcatagccattaaatgataaccgtcaactgaatcgattggaaatttggctagtaaagtagagaaacaaattgataaagtagttgctacattaagaagtgtatttataaataatgcaataaatatattttgcagatgtttgtgatgatttaaataatttgaataggtgaataaaataacaatagataagagaattagagttatttcaggtacagaaaaataattgcataggcttatagaaagaaagtttatccctacaaaaataaaatatgaaagtaatctttttctagtgttaaaaattatatatatgaataaaatcgaaattatcgattctgtcatattgataattaaatcaaaatagctcatagtaacccccaaatatagctttgatagtgtttttcgaaatgtttattatatcctaaggatatgattagttcgatattattttttaaacaaattttattctttttaatatcttttatatgtaacatatttattatagtagaacgattaatgcgtactaatccattagaaaggtgggatttttcaatgtttcctatagtgtcacgaatacaaatagattttttgttttcatataaaaagatataacataagtgatcttctacaatgatgtaataaatatctttgatgcgaatatttttcttccgatcgtaaatataaccagtaataaatttatcattctttttcaatgatttaaataactgattacagacattgattatttctattttaatattttgtttattaataaactgaaatggatgaatattgtatgcgtttgcgcgataatcattattattagtaacaactataatttttgtttcataataattattaagacgttcggcaaatgaaaaaccatcttctttaggcatttcgatatctaagaagatagcgtcataaaaaatactcaaatcaaaattcaatgaattattataaacatcaagtttatattcaatattatgaagctgacattccttttctaatgtcgataggattaatttttggtcaaaatgattatcatcaataattgcaaacttatacatagttatttctcctttagtgactattatatacgaaacttgacgattcgcgaaataaaatagtactttacgacatatatattgtattaatttggtgttatgatattgtgatgaaaggagatgtggttatgattgatagtttatcaaataagttagtgaattatttagacaaaggtaattatttagatgaggataaagaaatataccttcatggagctaagctgattatttctgaagtgattgggacgttgctgcttttagtgttgggtttaatgactaatcattttattgaagcagttgtttatgaaattgttttatcaagcacaagatcaattttaggcggatatcattgtaaaagttatgccgcttgtatttgtacatatgctggttttttcttggcgggtgttatatttttaaattattatcattttacattaatgacaatattaatagtgtgtttgattggttcaattaatattttagctttaggtccagtagataacgtgaataaagttgcgagtaaaaagaagaaagatgtattcaaacgttattcaaaaatagtcttaataatttatctaacaataatagcggcattattccatattcataatggatatttagacataatggtttatatatttattgtgattaatctactaatgttgggagggaagattgattatgaaaaatctaaaaagtaaagtattaaaagttttaagttcaggtttatttttagttgctgttcaagcggtaagtgtatattcttctagacatattcaccaagaacaagaacctgaggcattaaagaaatacgacagatattaataagaaaaggattgagataaattgcgtatctcaatccttttttgtatgccgggcatggcatatatctaggtggtgaaagtccactgtgggggtgccaaccactagccaatatcaagggtgtctatcgtgaggtggaatctgaaagaagatggaggcaaaatcttggtccgaggaacatgaatcacatcaggcatataatggggacgagtgtgcaaagcaacatgaagtcataagaggttgtggaatgaaactattatatgtaaatgtggcagatatatggaaggaaagagatatgaccttatcctgggaggtctcatgatggagaaatcctagtaataatgaatcatgggaagtcagcagaggtcgtagtagcaaagaagtggctgtaatggtcatggagcgaaggcccgaaagaagaatacaggggaagtgagtataatggatagcgaaagaaatggaggtaacggaaatatgaaaactgataatgcattgcttgaacagatgcttagtgatactaatctaggactagcatttacacaagtaaaacgaaacaaaagtgcaagtggagcagatgggagtagatgaacttaaaggttatctagaagaaattaaggacagtatacgtaacaagacatataagccagaacttgtacgaagagtagaaatacctaaacctgatggcggagtacaaaatttaggagtaccaacagtacttgatagatttgttcaacaagccatagcccaagtattaatacctatctacgaatcaatatttagtgacaatagttttggctttagaccaaataggtgttgcgaaatggcaattatcaaagcgttagaatatatgaattaaggctttcagtaggtagtagatatagacttggaaaagttctttgatacagttaatcacgataaactcatctcacttgtcatgaagggtgtaaaaagtgaggagatagtatctctaattagaaaattcctagtgagtggaattatgattgataatgaatatagagagtcagtcgtaggaacaccacaagggggaaatctaagtcccctactcagtaacatagttctcaatgaactagataaagaaatggaagcacgagggctaagattcacacgttatgcagacgattgtattatattagtgggtagcagtaaagccgccgatagagtaatggaaaacattagtaaattcatagaaaagaaacgtagatttaaggtaaacatgactaaaagcaaaattttgaaacctaatgatattaaatatctaggatttggtttctactatgactctttttcatctatgtggaaagcaaaaccacatgagaaaactgcaaacaaaattgaagaaactaacaaatagaagttggtcagtatcttgggaatatagaatacttaagataagacaactgatagttggatggattaattactatcggataggaaattttatgggtgtatgtagaaaactagataaacaaataaaatttcgaataagaatgtgcctttggaagaagtggaagacgaacaaaagcagggaaaagcaactaataaaattaggagtattaccatggcaagcaaagacttaggcaaactgtcgtgagtcatatgcaagatgtgcaagcacatttctacaaacaaaaataacaaacaatttactatataaaaaagggctaccatcaatggtagtccagtatcagttaaaacatatttcaatatagatttaaaccgtcgtacggcacgtacggtggtgtgagaggtcgaaaataaatataaaattatttattttctcctactcgattattttattaaattgttttctaataaaaagttataagcaacatcttttgttttttgtttttcttcatctactttataatttaggtctaccattacttcttcgtttagataattttgtaattgattaactaattcaatgatttctggacattcatctttgattctttgattaatgatcggaatagcattgtatggtaagaagaagtttttgtcatcagttaacacctttaagtcaaatttctttaatagtccatcagtagaaaaagcatcaactagatcacattcattattaactaatgctgtatatcgaggtgaaccatcaattgggataacttctttaaactgaagtggatatgtttcttgtaaaccgactaagcagtcttttctttcaacaaatgttaatgttggtgaaaagattaattgattagaaactttacatagatcactaattgtttcgatgttatatttatcagcagtttgcttgctcattgctaaggtataagtgttgttaaatcctagtggttctaaaacggtaaaattatattgttttttcatttcgtctttgactgtgttgtagacagcttctacgtcactgttaggctcaaggccgagaacactaccgtaaatagttcctgtataatcgacatacatatcgacatcaccagttttcatcgcatctaagacgattgacgaagagccaagtgataatgactggtttacttctacatcggtatttttttcaatcaaatactttaacatatagttcaatatttcttgttcagaaaagtccatactaccaatattgattgtgattttatcgctagttttgcctaaattagtataaacaaaacttccagctagacagatacaagtagcgataataacgatcttatcaataagtttttttcctttgctttgtggactggctagttgattgcatttaggggtaactaaaacttctaaaattgaaaaaatataatcaatcaataatgctaagatacaggcaggaatagctccggctagaatctgtgcattatttactgttcggattcccgcatagactaaataccctaatcctccggcaccaataaaagctgctagagtcattaacccgactgaactgactgctgagattctaactccggccatgataacaggtgctgctaaaggaatttgaactttataaagcacttgcattggtgttaatccgattcctttagctgcttcaagggtatcgctattaatgctatccaatccagctacggtattttttataattggtaataacgaatacaagataaccattacaatcgctggttttgttcctattcctaataaaggaatcatgaatcctaacaaggccattgatggaattgcttgaataatattcgcaattgccatgactggtttttttgatggtttaaaataagtaataatgattcctagtggaactccaattaaaattgaaataataatagcaagaatcgttagttgaatatgatcgataaagagtccgaagatagttgaaaagttttgactaaagtaattaataaattcattcattttaatcatcctcactttcatcatatttctttgataaagtggttactaatgtactcttagtaattaatccaactaatttgtttttatcatcaactactggcaaagtgtaaatattactgctgttagctagattgatgacatcaacgatagattcatcgggtttaactgataaacattcggtatgcattacctcatcgacctttttatcacgattcttttctctagctgcttgattagcatcaagaattcctaaaaagttttgatgattatcaacgatcatcaaactatcaactttataattatacataatgtttacagctttgatacattttaaattgacattacaagtaattggcttatcaatcatgatatcagctaccttgattaattctggcgaatcccatattcgtttttttccaacgaagttatgaacaaaatcattagcaggatgctttaaaatttgttcgggcgtatcaaattgttggacacggccatcagacataatacaaattcgatcagccattttgattgcttcagccatatcatgagttacaaaaataatggttttatgtagcttgttttgtaacgttagcaactcatcttggagttgttctctggtgattggatcaagagcactaaatggctcatccattaagatgatctctggatcactggcgaacgctcgggcaactccgaccctttgctgttgaccgccactcatttgagtagggtataagttcatatacccttctggatcgagtcctaccatatccaatagttcaacaaccttggtggcaaggctgggatccttcttgttttttaattttggtattaattcgatgttttctttgacagtcatatggggaaataatcctgtctgttgaattacataaccaatatttcgtcttaaatcaatttcgtcttctttgctgatgtctttaccgtcaacatagatagccccacgagtaggcttgatcaagcggttgatcatttttaaagcggtagttttaccacagccactaggaccgatgatacaaacgaattctcccttatcaattgaaaacgaaacgtcttctagtacatgtttgtccttaaaagacttatagatgtttttaaattcaatcatttaatcattcccttcttaagtacctattatatcacagaaaatgtgtactttatgtgaatatggtaatttacttctattgttgtgataataaattagcatgatttcatcaataaaattgtttattgatggggtgttcaacagcataaaaaccgccgttgaagctgtatgcgtgataaccacagcgcgttaatttttgagctagatcaagggatcttttgccgctgtaacagattaaataaataggtttatctttggggaattgtggtggagtggcgataaaagtatcgtaagggatattgatgaacttgcgcaaatgaattttattaaattgtaaaggatctcttaaatcgataaatgtataatcatgttttagtaattcgggtaatttgtcgacactgattaattggctgttttccatatatttcacctcattatattgtatgaaattaattgaaaacaatgaataacagtgatataattcagccatggaggaatattaaagatggataaaaaaacaatcaaagatatcgaagtcgctggaaaagtagttttatgccgtgttgacttcaacgtaccaagaaacaaagaaactggagaaattacaaatgataatcgtgtggtagctgctttacctacaatcaattatctattagaacaagctccaaaatgtgtagttttattctcacacttaggaaaagtaaaaacagaagaagacaaagctaaaaatgatttagctgttgtagctccttgtttagaaaaacatttaggaaaacctgttacttttgttaatgcaacaagaggaccggtattagaagatgcaatcaaaaatgctgctgatggagcagtaatcttagtacaaaatactcgttatgaagctggtgaatctaaaaatgatcctgaattaggtaaatattgggcttctttaggtgatgtatttgttgaagatgcatttggttctgtacatagagcacatgcttcaactgctggtatccctgctcacttaccaagtgcagctggattcttagttgaaaaagaaatcgcttatattggaaaagctgtaaatgatcctgaaagaccaatggtcgcaattttaggtggagctaaagtttctgataaaatcttagttatcgaaaacttattaaaagttgctgataaagttatcgttggtggaggtatgtgctatactttcgctaaagctatgggtcataacattggtaactctttagttgaagatgacagaattgaaatcgctaaagaattaattgctaaagccggagataaattaatcttaccaatcgattcaatttgttctgataaatttgctgtagatggtgatatcaaagaatgtggtgaagatgtacctgatggatacatgggattagacatcggacctaaatctgttgaattattcaaagaagcattacaaggtgctaaaactgtagtatggaatggcccaatgggtgtgttcgaaatggaaccatttgctaaaggaacaattgctgtatgcgaagctttagctaacttagatggtgctaatactattatcggtggtggagacagtgctgctgctgttatgcaattaggatatgctgataaagtttctcacatttcaactggtggtggagcttcattagaatatatggaaggtaaagttcttcctggtattgctgcaatcgatgataaataataaggggaaattataatgagaaaaccaattatcgtaggaaactggaaaatgaataaaacaatcgctgaaacaaaagcgtttgttgaagctgtagatgctaaagtatcagacagtgctgattggggtattgctacgccatacttagctttacaagctgcaaaagaaggaactaaaaaattattagttgctgctgaaaactgtcatttcaaagatagcggagcttatactggtgaagttagtgttgaaatgttaaaagaaattggagttgaatgggtaatcctaggacattctgaaagaagacaatattttggtgaaactgatgaaacagttaatgctaaaatgttacaagtattaaaaaatgatatgactccaatcgtttgtgttggtgaaacattagaagagtacgaagctggaactactaaagatgttgttaaaactcaaacagttgctgccttcaaagatgtttgccctaaatgcgcaggacgtactgtgattgcttatgaaccagtatgggcaattggaactggaaaaactgctactaatgaaattgcacaagatgtttgtggatatattcgtagtgttgttgctgaactttacggtcaagaagttgctgatcaagttagaattcaatatggtgggtcagttaaaccagaaggattaaaaactttattagaacaaccagatatcgatggtgctttagtaggtggagcttctttacaagctgattcttacattgcaatgattgaaaacttaggataataattgagagacttcataaagaagtctcttttaatatgtatatttttatttaaatagggtataataaagaaggagttttattaattaaattaataaagcatattagtaactattattgttaaactatgctatagtgtagttgcaagggatagataaattaaaaaggaggtttgaagatgaaattattaaaatgtccaatttgtggaaatgttgtggaaatggttgaggatcatggagtaccattaatgtgctgtggtaagaaaatggaagaggttgaagcaggtgcggttgatgcggcacttgaaaaacatgttccagttttaaaagtagaaggtgattgcttaactgctgttgtaggggatgttttacatccaatgacaccagaacatttaattagtaatatttggattgaatttgctgatggtagcaataagaaggtcacactaacttctgatgacgaaccaattgctaagtttaatattgctggtaaaagtggtaaagctacagtctatgaatattgcaatcttcatggattatggaaaacagaaatcgaactatagaaacctccattgtggggtttttatttttgtccgtatataataaaaagaaagagtgttctgctgatattatctttactgttagtctggggtttccagttttaggagtagtatcaagtgaatcactctttttagtttaaaattacgactaaggtcgaagaccactaccaccttgaatcgtcatagtttctccggtaatgtagtgaccggcttcgctagcaaaaaagactgctgcacttccaatgtcattttcaggatcagcaaagcgttgcattggaataccttgaatagttttttcatataagtcagggtactcttccttccatttagtaagaccttcagtcattgctaaggggcaaattacatttacattaatgttatcaggaccccattcagctgctgcaacacggcttaaccctcgaatcccttctttggcagcggcataagaagattgcccgagtttgccaaatagtccagcccctgaggcaaagttgataacactaccatgactttcttttaaatatgggtaagcagctcgcatataaaagaaggttgcgtatagaccggaattaattgctaaatcaaagtcttctttagtatggtcttttaacataacgccagatttagatgcctgtgcgttatttacaacgatattaatttttccataatatttgatggttttgttaatgacattattaacatcatcttcattagctccatcagcaggaatgcatagtacattgatttggtattgagattctaatttctctttagcattgtgtaaagtatttctgtttctcccggtaataactaggttagccccggctttagcaaaggcttttgctaacccaaaaccaataccacgaccaccaccagtaataatagcgactttattttgtaatgttttcatattatctctcctttggttagttatagctaacttatttgatatattagacgtatttattaatgttgtccaataatatgcagtaataatattcccgaaaacatttattttattagatgaataagataaatgttttagtataaatcttatagtaaaggaaataaagcaggttttattattagctgatctaagatatttgaccataaataaaaataatttagagaaaaaaataaaaaagtattgcatttatcgaataataatgtataatccttagttgacgcaatatgtgttactatgcgtggaaggacaatgtccatttgaccacagcacggacaaattttatataggaggtatgtcacgtgagtaaaaaagtcgcaagagtcatgaagattcaattcccagctggaggagctaaaccaggtccagcattagcaggagcaggaattcaaatgcctaaattctgtacagctttcaatgatcaaacaagagatcgtatgggtgaaactgtaccagtagttttgactatttatgaagataaagattttagttttgtactaaaaactgcaccagcagcggaaatgattaaaaaggcttgtggaatcaaaaaaggttcaagcaatgccggaactactgaagttgctacattatcagctgaaaaattaaaagaaatcgctgaatacaaaatgccagacttaaacgctatcgatttagaatcagcaatgaaaatcatcgctggtactgctcgtaacatgggtgttaaagtagaagcataattaaagattaaatattaatcgtcatttgtggaaggataatccgtttgaccactaaggaggaaaaataatggcaaagaaaagtaaaagatatcaagaagctgctaaattaattgaaaaaggtaaagcttattcaatcgaagaagcagttgcattagtaaaagaaactagtaaagttaaatttgatgccgcagttgatgttgcatttagattaggagtagatcctcgtcaagctgatcaacaattacgtggggcattagtattaccaaacggtactggtaagtctaaaaaagttttagttgttactgaaggacctaaagctcaagaagctaaagatgctggagctgatgttgttggtggtaaagaaattttagaagacatcaaaaaaggatggttagattttgaagtaatgatcgctactcctgatatgatggctgaattaggtaagttaggtcgtattcttggacctaaaggattaatgcctaaccctaaaacaggaacagtaactatggatgttgctaaagctgttaaagaaacaaaagctggtaaggtaacttaccgtacagataaagaaggaaatgttcaaatgacaattggacgtgtttcatttgataatgataaattagtagaaaactttacagcaatctatgatttattagtaaaaatcaaaccttctacttcaaaaggtgtttatatgaaaaacatcgttgtctcatcaactatgggacctagcattaaaatcgcagccgctaaatagtagctgctaaacaaggcgcaatcaatatacccaagacagtaactgggaaaccttaatttgttaccgaggtgttaaagagatatatattatatattgactttgactctcgtttaaacgagagttttagtttgagtatattgttgcatatataaaaatttacaggaggtgtgacaatgtcagcagaagcaattaaagcaaaaagcgcattagtcgaagaaatcgctgctaaattgaaaggagctcaatctgcagttgtagttgaatatcgtggtttatctgtcgcagaaatgacagaattacgtaacaacttacgtgcagaagatgttgaattaaaagtttataaaaactcattagttcaaagagctactgtagcaacagaatatgaaggacttaatgcagaattaacaggaccaaacgcaattgcacttggtaatagcgatgctgtagcaccagcaagagtaatcgcaaaattcgcgaaagatcatgaagctttagtaattaaagcggcagtggctgaaggtaaattattaacagtggatgaagttaaagaaatttctaaattacctaaccgcgaaggtatgtactctatgttacttggaatgttacaagcaccagttagcaagtttgcacgcgtagtaaaagctgttgcagaagctaaaccagaagatggtagcgcagcagcagaagaagcagcaccagttgaggaagctgcaccagaaacaccagttgttgaagaaacagctgaagaaacaaaagaagaaacagctgaataatcagctatataaattggaggaaaataaacatggcaaaattaacacatgaagatatcttagcttacttagaagaagctacaatcttagaattaaatgatttagtaaaagcaattgaagaaaaatttgacgtaactgctgctgcacctgtagctgtagctgctgctggagctgaagaagctgctggagaacctgctaacgtaactgttacattgacagaagctggtggaactaaagttgctgtaatcaaagctgtaagagaaatcactggattaggattagttgatgctaaaggtttagttgacaaagcgccatctgtaatcaaagaaaacattcctgctgcagaaggagcagaaattaaagaaaaattagaagctgctggagcttctgtagaagttaaataatttatatttgactaaataaagagcccttcggggctcttttatcttggaggacatatgaaacattactatacaaataatgaagatttaattagtgaaccagaacaatttatttttacttatcgtggtaaagaactaatatttactagtgatcatggagttttttctaaaaaaatgattgattttggatcacgagttttattagatgcaattgaattagatgagggtaaatctactttattggatgtggggtgcggttacggcacttttggggttgctcttaaaagtgcttacccggctttggaaatcgatatgattgatgtgaatgaacgggccttgttattagcaaaacagaatctagctgctaataatttagaagctaatgtttatttaagtagtgtttatgaaaatgttactaataaatatgatgtaattgttacaaatcctccgattcgggctggaaaagaaactgttacaaaaattttagttgaagctaaagaacatttaaatcttcatggagaaatttgggttgtgattcaaaagaaacaaggggcgccatcagctaagaagaatctagaaagtgtttttggtaatgcaaatgtcgtaaaaaaggataaaggatattatattttaaaagctattaacaagtaaatttacttgtcaatagtttttttgatatttttttatttttttgttgactttaaaatatccttgtgatagagtattaaaatgcctattaatgtttaaaatcaagcgcttttgcgcgctctaaaacatgttgatagagaaatataaaggggtggagttaatacgtggaaaacaaaataactgaagcaaaaagcaagattactcgtcgtaattattcaagaattagtggatctttagaacttccaaatttagtagaaattcaaacaaattcatataaatggtttaaagaagtaggtattaaggaagtatttgaagatatctacccaattactaactttaacgaaacattgtcgttagaattcgtagattgtacatttgatgaagcaaaatattcagtcgaagagagcaaagaccgtgatgctaactatgctgcaccaattagagcatctttacgtttagttaattctggtactggtgaaattaaagaacaagaagtatttatgggagatttcccattgatgactgactcaggaactttcatcattaacggtgctgaacgtgttatcgtatcacaattagttcggtctccaggggcatattttgctgatgccttagataaaagtggtaaaacagtatttaatgggagtattatcccttcaagaggtacttggctagaatttgaaacagatgctaaggatgttttaaacgtgcgtatcgatcgtaatagaaagatgccgggaactgtattattaagagctttaggtctttcaagtaacgatgaaatcatcgatgtttttggtgaacacgagtatatcatcaacactttagctaaagataatacaactaatactgaagaagctttaattgaaatttataataaattaagaccaggtgaaccagcaacattagaaggtgctaacaacttattatatacgcgtttctttgattgtaaacgttatgatctagctaaagctggacgctttaagttcagaaaaaaattgagccttttagatcgtattgcgggacgtattttagcagaagatttagttgatgttgacggaaatgtagtatacccagagggtactgtagttactcaagaagttagtgatacaattaaaccaattcttgaagctggagctcatacacgtgaacttgataccaaccctagattagaatcaaacggtgtgatccaagtattagatgtttatgtagatgatactaaaactaaaaagatgcgagttattggtactgatttatctttagatagtaagtttgttactatttctgatatgatggctgcttattcatatatgtttaacttagtagatatctatgatgcgttagatttaacagctgaagatcgtgttaacttaatggctcggattggattattagatgatattgaccatttaggtaatcgtcgtgttcgttctgttggtgaattaattcaaaatcaatttagaattggtttatcaagaatggaacgggttgtaaaagaaagaatgtcattgtctgaagttgattcaattacaccacaatcacttactaatattcgtccgttaactgcggcaattaaggaatttttctcttcttcacaattgtctcaatttatggatcaaatcaatccccttgccgaacttactaataaacgtcgtttatcagcattagggcctggtggtctaagccgtgatcgtgctggttatgaagtccgtgacgtacatgcgtctcactacggaagaatttgtccaattgaaacacctgaaggtccaaacatcgggttgatttcaacattagcttcttatgctaaaattaatcaatatgggtttattgaaacgccatatcgtaaagtaaataattgtgttattgatgaacatgatgttcgttatttaactgctgatgaagaaaaaaattatattattgcgcaagcaaatgttagaactgataaagatggtacgattctagatgcccaagttattgctcgtcacttaggagaaaatatcatggctaagcgcgaagaagtagactatatcgatatttcaccaaaacaaattgtatcggttgctacttcttgtattccgttccttgaaaatgatgatgctactcgtgctttaatgggtgccaacatgcaacgtcaagctgtaccattgttaaatccacatacgccatttgttggaactgggatggagcatcaggcagctcgtgattcaggtgcggcagtagtatcacgtgaagatggaattgtaacatatgttgatgctaaaaaagtaattgttgaagataatgaaggggttgaacatcgctaccgtttatctaagtttaagatttcaaacaacggtacatgtattaaccacaaaccaatcgttaagactggggaaaaagtattgaaaggtcaagttttagctgatggtccggctatggaacaaggtgaacttgctttaggacaaaacgtattagtaggattcatggaatggaatggatataactatgaagatgcggttattatgtctgaaagattagtgaaagatgatgtttatacatctgttcatattgatgagtatgcaatcgaatgtcgtgatactaaattagggcctgaagaaattactcgtgacattcctaacgttggggatgaagctcgtaaaaacctaaatagtgacgggatcattatgattggtgctgaggttaaagagggtgacattctagttggtaaagtaacaccaaaaggtcaagctgagctttcggcagaagaaaaattattacttgcaatctttggagaaaaatctcgtgaagttaaagataattcattaagagttcctcatggtggggctggaatcgttcatgacattaaagtatttgaaagaaaaaatggtgatgaattacaaccaggtgttaataaagttgttaaagtttatattgttcaaaagagaaaaatttctgaaggggataaaatggcaggacgtcatggtaataaaggggtaatctctaaaattttaccaattgaagatatgccacacttagaagatggaacaccattggatattatgttaaacccattaggggtaccttctcgtatgaatatcgggcaagtacttgaattacatttaggttatgctgctcgtcaattaggtttatatattgcaacaccagccttcgatggtttacatccaagtgatctagaagatatcatggctgaagcaggaatgtctaaagatggtaaacaacctgttatttctggtcgtactggtgaatattttgataataatatctcagttggaatcatgtatatgattaaattagcccacatggttgatgataaattacatgctcgttcagttggtccatactcactagttacgcaacaaccattaggtggtaaagcacaaaatggtggacaaagatttggggaaatggaagtttgggcacttgaagcatatggtgctgcatatacattacgtgaaatattaacagtaaaatctgacgatgttgttggtcgtgttaagacttatgaagcaattgttaaaggacaaccattaccagaaccaggattacctgaatcatttagagtgttaaagaaagaattgcaagctcttgcattagatattcgtctattagatgaaaatgataatgaagtagatatgcgtaatatcgaagaagaggaacatcgtttccctcgtagtatcgataaagatgaagtgattgaaactcctgaaacagaagatgaattagaagaagaaattcttgaggatgatttagatgttgaagaagaggaagatttcgaagatatcgacgaagattttgatgaagaattagaagaaatcgaagaaagtgaatcattataggaggaataaagatggcaaatacaaataaattctcagcaattcaaattggcttagcttcccctgaaaagattcgcgaatggtcttatggtgaggttaaaaaacctgaaactattaactatcgttctcaaaaaccggaaaaggacggattattttgtgaaaagatttttggtccttcaaaggactgggaatgtagttgcggtaaatacaaaaaagtacgttataaaggtgtagtatgtgatcgttgtggagttgaagtaactaaatcagctgttcgtcgcgaaagaatgggacacattgaattagcaacaccaatcgctcatatttggtatttgaaaggaattccatcaagaatgggacttatcttagatatgtcaccaaaacaattagaagaaattatttactttgtttcttatgttgttattgataaaggaagtacaccattagaatacaagcaagtattatctgaaagagactatcgtaaatgttttgaacaatttggtcatacttttgaagcccaaattggggctgaagcaattcaaacattattacaacaagttgatctagatgctgaatttgcaaaagtaactaaagaacttaaagaagctcaaggtcaaaagagaacaaaattattaaaacgattagaagcaattgaggcttttagaacttcaacaaatgaaccagagtggatgattcttgaagctttaccggtaataccacctgatttgcgtccaatgttacaattggatggggggcgttttgctacttctgatttaaacgatttatatcgtcgtgttattactcgtaataatcgtttaaagaaattattagaacttggaacaccttctattatcgtgcaaaacgaaaagagaatgttgcaagaagctgttgatgctttgattgataatggtcgtcgttcaaaaccgattactggtgctggtggacgtgcattaaagtcattaagccatactctaaaaggtaaacaaggtcgtttccgtcaaaacttacttggtaaacgtgttgattactcaggacgttctgtaatcgcagttggtcccgatttaaaaatgtatcaatgcgggattccacgtgaaatggcattgaatctattcaaaccattcgttattaatggtctcgttagggatcaattagcaacaaatattaaagctgctgaaagattaattgataaaatggatgatcggatctggccaattgttgaagaagttattcaacaacatccagtgttacttaaccgtgcacctacattgcatagattaggaatccaggcattcgaaccaaaactagttgaagggcgagcaattcgtctacatccactggttactccagcgttcaatgccgatttcgatggtgaccaaatggcggtccatgtaccattaggtgaagaagcaattcaagaagctcgtcaattaatgctaggttcaaataatatcttaggtccaaaagatggaaaaccaatcgttacaccatctcaggacatggtattaggaaattattatttaacacttgaagatgaaggtggcttaggagaaggaactgtctttgctgatcgtaatgaagttgatcatgcttattttgctaaaacagtagaattacacactcgtgtagcaatcaaagcgtcagcattaaagaatgaaactttcactaaagcacaaaatgattgttatttaatcacatctgttgggaaaattttatttaatgacatctttgatggtaaattcccatttattaatgatccaagcagtgaaaacttaatcgctactccagataaatattttgttccaatgggaacagatattaaagaacacattagaaatcaaaagattattaaacctttaaataaaaaatctttaggaaagatcattgatgaagtgtttaaacattcagcaatgtctgatacaagtttaatgcttgataaattaaaagaccaaggtttctattactcaacaattgctggtacaactgtatctgtatacgatatccaagtgccggaagctaaatatgaaatttttgaaaaagctgatgaaaaactagagcaaattaaaaagttctataataaaggtaaattaactgaatcagaaagatatcaaaatgtaattaaattatggactgacgttaaagacgaagttcaagaagttgtacgtttagagttcgaagctgatgatcgtaacccgatcttcatcatgtctgattctggagcccgtggatcattatctaactttacccaattagtaggtatgcgtggattaatgtcaaatccaaaaggggaaacaattgagttgccaatcaagtcttcatttagggaaggtttaacagcatcagaattctttatctctacccatggtgctcgtaaaggttctaccgatacagctttaaaaactgccgattctggatatttaacaagacgtttagttgatgttgctcaagaagtaattatttctgaagaagactgtggaactgaccgtggctttgtagttacagaattatacaataatgatgataaatcagtcattgtaccattacatgaccgtttggttggtcgttattcacaaaaagatattttccatccagaaactaaagaattaattattgctggtggagaattaattactgaagcattagctgatgaaattgttaatgctggaatcactgctgtagagattcgttctgttttagggtgtaatgctaaaggtggagtatgtcgtaaatgttacggacgtaacttagctacaggtgatgtggttgaattaggagaagctgtaggtattatggcggctcaatcaattggggaacctggtacccaattaacaatgcgtacattccatgatggtggggttgccggtggtgccgatattactcaagggttacctcgtatccaagagttattcgaagctcgtaatccaaaagcaaaatctattattagtgaaatcgaaggagaggttactaatattattgataacgctggaagaatggaagttgttattactaatgatttagaaacgcgtagttatttagcgccatacggtgctaaaatccgggtgaacgttggtgatcatgtcaatattggagctaaaatcactaaaggttcaattgatccaaaggaattattatcagttgctgatgttgaagcagttgaaaactatattattaaagaggttcaaaaggtatatcgaattcaaggtatcgaaatttctgataaacatatcgaaatcatcgttaaacaaatgctaagaaaaatgaaagtagttgaaggtggggaaacaggttgtctacctggtacaaatattaatgtaaacgcctttactgaattaaataaacaagttttaaaagatggtaagcatccagcagtagctcgtccagtattactagggattacaaaagcatctcttgaaactgaatcattcttatctgcagcatcattccaagaaactactaagatcttgaccgatgcttcaatcaaaggtaagaaagatcatttattaggattgaaagaaaacgtattaattggtaagctattgccagcagggactggtcttcgtggagctcttaaatcaccggaaagattagcgcgcgaagctgaagaagcaatgttagcgagtcaagaagatatggatgatttaattgataatgacgatgaaatagaaatgatggaacaagcaggttaatccctgcttgttttttatgttaataaatttacttgcaatgctagttactaagtgttaatataaacttgtcactatatagtgacaaagagcggttatgaatgaatctcaaatcttgaattagggatgtattttgactctttatggtaaatcacaattgtgtagtaaaatagggattttattttttcatggtagtcctggcagtggggcacatgcacttatgcagttatcgccttttcaagaacttgagaaatggtagcaatgtttttattttgatcaacgtggtagtggcaagtcagaatatgatctccgtaacggcttaacaattgaacaaattaccaccgatgtatttgctgttgtagaggtaataaaaaacaatgggatatagaaaaactggttctttgggtggatcgttttgaggttatttggcctgcttatgtatagtatgtttttatcaatcgtttacgggtcttgtttttaagcagctcggcgattatttttaatcatcaacagccagtagaattctttttttaatgaaatctttttatgcaaataaagtttgttctaccgataaagttcctacagcagcaagattagcaccagaagagtttttttcattatcatcaactcaagaatttgtctttagctcgcttaatacctctaattcattgcaacatattactgcgatgagcgactggttttattgttattattttggtttcctatttgataatttaatagttttgacgttaatcatgcaggaaaaagaaaatccgatttgtgcttatcaaaatcttgatcagcaaatcgaactaataaaaaatgaattaattcgatatcttttatttgctgattgtggggatgctgtttttgaggatcaagtagatgtttttgcagaagaaataaacaaatttatagaggagaaaataaaatgttagtatatatttgttgtgctggtggggcaacatcaagcttattttgtaaaaagattggggatgcctctaaggttccaactacagtggaagatatttttacagtattaaagaattatgatgagtatgataataaatatgagataattttagcttatggaccggctgagtttttaaaagaacgttgtattagggaatataatttaggtgaaaaaatttcaagtatatggattgctccgcaagaacgttttatgttgccgacaattcaaaaaatatttgcaaagtataataccccggtagcagctatcgatatgagaacatttggaacgatgaatggtgctaaagcattagcggatattcttgcattgtaaagtctatacaaccacacataaaagttctataataataaaaatggaggttggtaaatgtgattgatttgaatcaagtgatgacgtttactgaagcggcagataaatggggatttgctaatggcaatacgattcgtaaggcggttgaaagaaataaattcttgccagcggaaattcgtaaaagtggagatgtctggttaactacctatgcagcaatgctgcgggttttcggtcaaccaagaaaattggacgaagtgattacctaccaagagattgctgaattgataacggatgcagtctatttacataaaaatgtagatttagagatgaattcgattttccgacgaattgctggagcaattgaaaaaaggcaaacgataacggtagttgagtctcgaaataaatcagaacgaattttaatggttgttaagacaagagatgatttagaagcatttatgaatactttaaagcgttatttagattcagtagatataaaattaaagaaagagtaaaaactgtttaaatataaaaagcgtttaaatggtttttattttgtttattaatgatataatcaatttttttaaaaaaaacaaataaaattattgacatatttatatttttgtaataatatgaactacggtgcccgcataggggcgcgttgtttattacgaaatatgaaacacccggaatcgtgtgtttaagtatggaagaaaggagaacaaggaatgcctacaattaatcaattagttagacaaggtcgtaacgacaaaaccacaaaatcaaaatcaccagcgttaaacagaggttttaactcattagctaagaaaccaacaacaactaattcacctcaaaaacgtggtgtttgtacacgtgttgctactatgacacctaaaaaacctaactcggctttacgtaaatatgcccgtgttagattatcaaatggaatggaagtaactgcatatatcccaggaattggacacaacttacaagaacatagtgttgttttaattcgtggtggtcgtgttaaagatttaccaggggttcgttatcacatcgtacgtggtacaatggactgtgctggtgttaatgatcgtaaacaaggccgttcaagatacggtgctaaaaaaccaaaagcttaagaaaaatcaagtataggaggaaaattaaatggcaagaaaaggtcaagttgctaaaagagacgttctacctgatccagtgtacaattctaaaactgtatctaaattaatcaacaacattatgcttgatggtaaaaaaggtgttgctcaaaacatcttatatgatgcatttaaaaaagtagaagagaaaactggaaacccagcaatggaagtttttgatcaagcaatcaacaacattatgccagttcttgaacttaaagttagacgtattggtggggctaactaccaagtaccagtagaagtatctggtgaaagaagaatgactttagggttaagatggttagtaaattattctcgtttaagaaacgaaaatacaatggttgatcgtttagctaacgaaattattgatgcttctaacggagctggtgcttctgttaagaagaaagaagatactcataaaatggcagaagctaataaagcatttgctcatttccgttggtaatatccaacaaatgataacgaaaggagaaaaattatgtctcgtgaattctcattagagaaaactcgtaatatcggaatcatggctcatatcgatgctggtaaaacaacaactactgaacgtgtcctttattacacaggtaagattcataaaattggagaaacacatgaaggtgcttctcaaatggactggatggaacaagaacaagaacgtggtattacaatcacttctgcagcaacaactgcacaatggaatggataccgtgttaatatcatcgatacaccgggccatgtagacttcactgtagaagttgaacgttcattacgtgtattagatggtgcggttactgtattagactcaaaagcaggtgttgaacctcaaactgaaacagtttggcgtcaagcaactacttatggagtaccacgtattgtattctgtaataaaatggatgctactggtgctgactttattatgtctttagaatctttagaaaaaagattaggggtacatggtgttgcacttcaattaccaatcggtgctgaagatactttcgaaggaatcatcgacttaattaagatgaaagctgtttacttcgaagggactaaaggtgaaaacgtaatttacaaagatatccctgaggaatatttagatcaagcaaacgaatatcatgctaaaatgttagatgctgctgcatcttatgatgatgatctaatgatgaaagttttagaagaagaagaaccaactgaagaagaagttaaagctgctatccgtaaaggtgtattggctgtagaattattcccagtattatgtggttctgcttataaagacaaaggggttcaaccaatgttagatgcagttattgatttcttacctgctcctactgatattccttcaattaaggggattgatgaagatggtaatgaaattgaaaaacatgcttcagacgaagaaccgtttgctgcattagcgttcaaaattatggctgacccatttgtaggaagattaactttcttccgtgtatattcaggaactgttgattctggatcgtatgtattaaattcaacaaaagataagaaagaacgtttaggacgtattcttcaaatgcatgccaataaacgtaatgaaatccaaacagtttatgctggggatatcgcagctgctgtagggtttaaaaatacaactactggggatactatctgtgacgaaaagaatttcgttattcttgaaaaaatggaattccctgaaccagttattgaacttgctattgaaccaaaaacaaaacaagatcaagataaattaggtgttggattatctaaattagctgaagaagatccaactttcagaacatttacaaaccctgaaactggtgatacagttatcgcaggtatgggtgaattacacttagatgtaatcgttgaccgtttaagaagagaatacaaagtagaagctaacgtaggtgctccacaagtagcttatcgtgaaacaatcaaaacagctgctgaatgtgaaggtaaatatgttaaacaatctggtggtcgtggacaatacggtcacgtatggatcaaatttgaacctaatgaaggtaaaggatttgaattcgttgatgctatcgttgggggatctgttccaagagaatacattaactctgttaaagtaggtcttgaagatgctcttgcaactgggatgattgctggatatccagtattagatgttaaagcgacattatttgatggttcttaccatgatgtcgattcatcagaaatggcatataaagttgctgcaagtatggcattaaaagctgctggtaaaaaatgtgatccagttatcttagagccaatcatggctgtagaagtaactgcacctgctgaatacttaggtagtgtaatgggtgacgtatcttcacgtcgtggtatgatcgaaggacaagaagaaagaggaaatgctgttacagtgcaagctagtattcctttatcagaaatgttcggatatgctactgatttaagatcatttacacaaggtcgtggtaactacacaatgatcttcgatcgttatgaaccagtacctaaatctattagagaagaaattattaagaaaaacggtggaaacaactagtatccaatcaaaatcttattgattttttcaactaaataaattagaatgtatatgtacaaaaatataaactaggaggaaccttaaatggctaaggaaaaatttgaccgctcaaaagcgcatgtaaatatcggaactattggtcacgttgaccatggtaaaacaactttaactgctgctattacaacagtattatcaaaagatggacaagctcaagcaatggattatgctgctatcgatgctgctccagaagaaaaagaacgtggtatcacaatcaacactgcacacgttgaataccaaactgcaactcgtcactatgcacacgttgactgtccaggccatgctgactacatcaaaaacatgatcactggtgctgcacaaatggacggtgctatcttagtagttgctgctacagatggaccaatgcctcaaacaagagaacatatcttattatctcgtcaagtaggtgtaccttacatcattgtattcttaaataaatgtgatatggttgatgacgaagaattattagacttagtagaaatggaagttcgtgaattattaaatgaatatgacttcccaggtgatgacactccagttatccgtggttctgctttaaaagctttagaaggagatccaaaatgggttccagctattcatgaattaatggaagctgttgattcttatattccaactccaactagagatactgataaaccattcttaatgccagttgaagacgtattcacaatcactggacgtggtacagttgctactggacgtgttgaacgtggacaattaaacttaaatgacccacttgaaatcgttggtattcatgaaactaaaaacactgttgctacaggtatcgaaatgttccgtaagttattagattacgctgaatctggagataacgtaggggttttattaagaggtgttaaccgtgaagaaattcaacgtggacaagtattagctaaacctggatcagttaatccacacaaaaaattcaaatctcaagtgtatatcttaagtaaagatgaaggtggacgtcatactcctttcttcgctaactatagaccacaattctacttcagaactactgacgtaactggtgttattgaattaccagaaggtgtagaaatggttatgcctggggataacgttgaattaactgtagaattaattgctccaattgcaattgaaaaaggaactaaattctcaatccgtgaaggtggtagaactgtaggttctggaaatatctctgatattattgaataataattacagaaatttggaaagtcacattagtggctttctttttttacattttgaaaataattgaaaccgcttgaaaagcacccttcacttaggtataatataagagcagatataaatctgaaaattcattgttataaggagatatcaaaatggatgaacaagaacaaatcgtaattaacctaattgtaaacagtggtagtgctcgtagctctgcaattgaagcaattcaatatgcaaaagctggtgacttagcaaaagctgatgaatcattacaacaagctaaagaaacagtaaacgaagctcatcattctcaaacagaattaattcaagctgaaattcgtggagaaaaagcaccattaaacttattaatggtacatgctcaagaccacttaatgactgctttggtagttattgacttagctcaagaatttattgatgtttacaaaaaaatcgggtaattttactagttaggtgaataaataccattcctttttgaaggagtggtatttttttacaaaaaaagacaaaaaaggctttacaagacaaaagggatatggtaaattaaataggcactcgaggaaagggacgtaaggaccggagagaaaaagcaaaaaaagttaaaaaaaagattgactaaaaagcgaaaagagtgtaagatattcaagtcggcaaaagaagccggagagatcattgaaaactaaacagaattaagaaacacacgtcaatatccagaaggataaaaaagaaaaaagagctaaacaaacgaagagttgtttaaataaacaatggagagtttgatcctggctcaggatgaacgctggcggcgtgcctaatacatgcaagtcgaacgcgagcacttgtgctcgagtggcgaacgggtgagtaatacataagtaacctgccctagacagggggataactattggaaacgatagctaagaccgcataggtacggacactgcatggtgaccgtattaaaagtgcctcaaagcactggtagaggatggacttatggcgcattagctggttggcggggtaacggcccaccaaggcgacgatgcgtagccgacctgagagggtgaccggccacactgggactgagacacggcccagactcctacgggaggcagcagtagggaattttcggcaatgggggaaaccctgaccgagcaacgccgcgtgaaggaagaaggttttcggattgtaaacttctgttataaaggaagaacggcggctacaggaaatggtagccgagtgacggtactttattagaaagccacggctaactacgtgccagcagccgcggtaatacgtaggtggcaagcgttatccggaattattgggcgtaaagagggagcaggcggcagcaagggtctgtggtgaaagcctgaagcttaacttcagtaagccatagaaaccaggcagctagagtgcaggagaggatcgtggaattccatgtgtagcggtgaaatgcgtagatatatggaggaacaccagtggcgaaggcgacgatctggcctgcaactgacgctcagtcccgaaagcgtggggagcaaataggattagataccctagtagtccacgccgtaaacgatgagtactaagtgttggatgtcaaagttcagtgctgcagttaacgcaataagtactccgcctgagtagtacgttcgcaagaatgaaactcaaaggaattgacgggggcccgcacaagcggtggagcatgtggtttaattcgaagcaacgcgaagaaccttaccaggtcttgacatactcataaaggctccagagatggagagatagctatatgagatacaggtggtgcatggttgtcgtcagctcgtgtcgtgagatgttgggttaagtcccgcaacgagcgcaacccttatcgttagttaccatcattaagttggggactctagcgagactgccagtgacaagctggaggaaggcggggatgacgtcaaatcatcatgccccttatgacctgggctacacacgtgctacaatggatggtgcagagggaagcgaagccgcgaggtgaagcaaaacccataaaaccattctcagttcggattgtagtctgcaactcgactacatgaagttggaatcgctagtaatcgcgaatcagcatgtcgcggtgaatacgttctcgggccttgtacacaccgcccgtcacaccacgagagttgataacacccgaagccggtggcctaaccgcaaggaaggagctgtctaaggtgggattgatgattggggtgaagtcgtaacaaggtatccctacgggaacgtggggatggatcacctcctttctaaggagaaacgcatgatcgaagatgatgcacaagagaagtgatgtttcgaagatactgtttagttttgagtgatactcaggtatgactcagagatcattgaaaactggataatagaaaataaattgcgatagaaatagaaaatgagatcgaaatagtaattgttattattgaggtctttctagaaaagtcgaaaactaagaattttcatcactaaaaaacataaatcgaaacggatggatggattttagtaaatagttgaaaatagtaatcaagcaaacaccaaaataggtaaagtaagaaagagcgtatggcggatgcctaggcacagagaggcgaagaaggacgcagcaaacagcgaaatgcgacggttagcagtaagcatgcaacgatccgtcgatgtccgaatgggggaacccacctggagtagagaccaggtatcctgaagtgaataaatagcttcagagaggcgagactcagggaactgaaacatctaagtacctgaaggaagagaaaataaacgaatgattccctaagtagcggcgagcgaaaggggaagagcccaaaccgatcttaggatcggggttgtaggactgtcggcaaagagcaagaaatcattataggcgaacggaatgggaagtccggcgaaacagggtgacagccccgtagccgaaatagtgaagaagcacgagacagcacctgagtacggcgggacacgaggaatcctgtcggaatccaccaggaccatctggtaaggctaaatactcctctgtgaccgatagtgaaccagtaccgtgagggaaaggtgaaaagaaccccgggaggggagtgaaatagaacctgaaaccatatgcttacaagaagttagagcccgttaaagggtgatagcgtgccttttgtagaatgaaccggcgagttacgatatggagcgaggttaagcaggatatgcggagccgaagcgaaagcgagtcttaacagggcgaaagttgcatgtcgtagacccgaaaccgagtgatctagccatgaccaggttgaagttggggtaaaacccgatggaggaccgaaccgacccccgttgaaacgttggcggatgagttgtggctaggggtgaaattccaatcgaactcggagatagctggttctccccgaaatagctttagggctagcgtcgaggtaaagtcgtgtgaaggtagagcactgaatatgtgatggccccatctcggggtactgaacataatcaaactccgaatgtcacaaagatatactcggcagtcagacagtgggtgataaggtccattgtcaaaagggaaacagcccagaccatcagctaaggtcccaaaatatatactaagtggaaaaggatgtggagatgtccagacaactaggaggttggctcagaagcagccatcctttaaagagtgcgtaacagctcactagtcgaatgactctgcgccgataatttaccggggctaagtatattaccgaagctatggatttacgcgtaagcgtgagtggtaggggagcgttctatgtgcggagaagcggtaccgtaaggagccgtggagcgcatagaagagagaatgccggtgtgagtagcgaaacgtgggtgagaatcccacgcaccgaaaacccaaggtttccagaggaaggttcgtccgctctgggtaagtcgggacctaaggcgaggccgagaggcgtagtcgatggacaacaggtagagattcctgtacttacggtatgaatgatggagtgacggagaaggctagcggatcctgctgatggaaatgcaggtgcaagcgaggtagccgacagccaggcaaatccggctgtcgaaaggcaaaggcgtgaggcgtatggaaagctgcggcaagtacagaagtccgtgaagccagcttccaagaaaagcttctagtgataatcatacagtaacccgtaccgaaaatggacacacatgggtgaggagagaatcctaaggtgagcgagagaactatagctaaggaactctgcaaaatgactccgtaacttagggataaggagtgctcatagagatatgagccgcagtgaaacggcccaagcgactgtttaccaaaaacacagctctatgctaagtcgaaagacgacgtatatggggtgacgcctgcccggtgctggaaggttaagaggatgtgtcagcgcaagcgaagcattgaattgaagccccagtaaacggcggccgtaactataacggtcctaaggtagcgaaattccttgtcaggtaagttctgacccgcacgaaaggcgtaacgatttgggcgctgtctcagctgtagactcggtgaagtcttagtacctgtgaagatgcaggttacccgcgactagacggaaagaccccatggagctttactgtagcttgatattggactttgatgcaagatgtacaggataggtaggagactgagagacatgcacgccagtgtgtgaggagtcaatgttgggatactactcttcttgtattggagttctaaccggatgccatggaactggcaacgggacagtgtcaggtgggcagtttgactggggcggtcgcctcccaaagagtaacggaggcgcccaaagataccctcagcttggatggaaatcaagcgcagagtgcaaaggcataagggtgtttgactgcgagacctacaagtcgagcagggacgaaagtcgggcttagtgatccggcggtgctgaatggaaaggccgtcgctcaacggataaaagctaccctggggataacaggctgatctcccccaagagttcacatcgacggggaggtttggcacctcgatgtcggctcatcgcatcctggagctgaagtcggttccaagggttgggctgttcgcccattaaagcggtacgcgagctgggttcagaacgtcgtgagacagttcggtccctatctgtcgtgggcgtaggaagtttgagaagatctgtcctcagtacgagaggaccgggatggacatatcaatggtgcaccagttgtcacgccagtggcacagctgggtagctaaatatggaagggataaacgctgaaggcatctaagtgtgaaacccacttcaagatgagacttcccattacgcaagtaagtaagaccccttaaagacgataaggttgataggtcaggagtgtaagcatggcgacatgttcagcggactgatactaataggtcgaggacttaacctagagaaaaagggttaaggcttgaaactgaaagaagacaaagtggaagacaaaagacgcaagaaaactattatctagttttgagtgattctcgaaaggaattgcttagaaaagaagatctggtagcgatagcatgatggacacacctgttcccataccgaacacagaagttaagcatcataacggcgaagatagtaccaaggtgcgacaatagcaagctgccggttctttttttatttacggatacctctgcgtatcctttttttattttatatccggctttaatataagcagttctggatgaattatgtcgtctatcatcgacttactgctatagttttaattagcccgggttaacagctgttattaagataataacagctgttgtgatttttcctgcaggatcaggatagattatctaaggcaggtaaaaatatttatgatcgtgcaggcgataaagtaaactctaacagagctggtacaggcattttatttaaaataagagcgtttggcgaagaatcagataaaatatcagcagacatgatgtttttgcgttgtattgaaaaatagacctgtttttaattctttaaaaaaaagaagtgacggttaataaaatagctatatttaataaaaaaataaaatcagaaaagagtcgaaaaaatgggagaaaaaagggaagtcacaaaataatgtgaaaataactctttacaagacaaaagggatatggtaaattaaataggcactcgaggaaagggacgtaaggaccggagagaaaaagcaaaaaaagttaaaaaaaagattgactaaaaagcgaaaagagtgtaagatattcaagtcggcaaaagaagccggagagatcattgaaaactaaacagaattaagaaacacacgtcaatatccagaaggataaaaaagaaaaaagagctaaacaaacgaagagttgtttaaataaacaatggagagtttgatcctggctcaggatgaacgctggcggcgtgcctaatacatgcaagtcgaacgcgagcacttgtgctcgagtggcgaacgggtgagtaatacataagtaacctgccctagacagggggataactattggaaacgatagctaagaccgcataggtacggacactgcatggtgaccgtattaaaagtgcctcaaagcactggtagaggatggacttatggcgcattagctggttggcggggtaacggcccaccaaggcgacgatgcgtagccgacctgagagggtgaccggccacactgggactgagacacggcccagactcctacgggaggcagcagtagggaattttcggcaatgggggaaaccctgaccgagcaacgccgcgtgaaggaagaaggttttcggattgtaaacttctgttataaaggaagaacggcggctacaggaaatggtagccgagtgacggtactttattagaaagccacggctaactacgtgccagcagccgcggtaatacgtaggtggcaagcgttatccggaattattgggcgtaaagagggagcaggcggcagcaagggtctgtggtgaaagcctgaagcttaacttcagtaagccatagaaaccaggcagctagagtgcaggagaggatcgtggaattccatgtgtagcggtgaaatgcgtagatatatggaggaacaccagtggcgaaggcgacgatctggcctgcaactgacgctcagtcccgaaagcgtggggagcaaataggattagataccctagtagtccacgccgtaaacgatgagtactaagtgttggatgtcaaagttcagtgctgcagttaacgcaataagtactccgcctgagtagtacgttcgcaagaatgaaactcaaaggaattgacgggggcccgcacaagcggtggagcatgtggtttaattcgaagcaacgcgaagaaccttaccaggtcttgacatactcataaaggctccagagatggagagatagctatatgagatacaggtggtgcatggttgtcgtcagctcgtgtcgtgagatgttgggttaagtcccgcaacgagcgcaacccttatcgttagttaccatcattaagttggggactctagcgagactgccagtgacaagctggaggaaggcggggatgacgtcaaatcatcatgccccttatgacctgggctacacacgtgctacaatggatggtgcagagggaagcgaagccgcgaggtgaagcaaaacccataaaaccattctcagttcggattgtagtctgcaactcgactacatgaagttggaatcgctagtaatcgcgaatcagcatgtcgcggtgaatacgttctcgggccttgtacacaccgcccgtcacaccacgagagttgataacacccgaagccggtggcctaaccgcaaggaaggagctgtctaaggtgggattgatgattggggtgaagtcgtaacaaggtatccctacgggaacgtggggatggatcacctcctttctaaggagaaacgcatgatcgaagatgatgcacaagagaagtgatgtttcgaagatactgtttagttttgagtgatactcaggtatgactcagagatcattgaaaactggataatagaaaataaattgcgatagaaatagaaaatgagatcgaaatagtaattgttattattgaggtctttctagaaaagtcgaaaactaagaattttcatcactaaaaaacataaatcgaaacggatggatggattttagtaaatagttgaaaatagtaatcaagcaaacaccaaaataggtaaagtaagaaagagcgtatggcggatgcctaggcacagagaggcgaagaaggacgcagcaaacagcgaaatgcgacggttagcagtaagcatgcaacgatccgtcgatgtccgaatgggggaacccacctggagtagagaccaggtatcctgaagtgaataaatagcttcagagaggcgagactcagggaactgaaacatctaagtacctgaaggaagagaaaataaacgaatgattccctaagtagcggcgagcgaaaggggaagagcccaaaccgatcttaggatcggggttgtaggactgtcggcaaagagcaagaaatcattataggcgaacggaatgggaagtccggcgaaacagggtgacagccccgtagccgaaatagtgaagaagcacgagacagcacctgagtacggcgggacacgaggaatcctgtcggaatccaccaggaccatctggtaaggctaaatactcctctgtgaccgatagtgaaccagtaccgtgagggaaaggtgaaaagaaccccgggaggggagtgaaatagaacctgaaaccatatgcttacaagaagttagagcccgttaaagggtgatagcgtgccttttgtagaatgaaccggcgagttacgatatggagcgaggttaagcaggatatgcggagccgaagcgaaagcgagtcttaacagggcgaaagttgcatgtcgtagacccgaaaccgagtgatctagccatgaccaggttgaagttggggtaaaacccgatggaggaccgaaccgacccccgttgaaacgttggcggatgagttgtggctaggggtgaaattccaatcgaactcggagatagctggttctccccgaaatagctttagggctagcgtcgaggtaaagtcgtgtgaaggtagagcactgaatatgtgatggccccatctcggggtactgaacataatcaaactccgaatgtcacaaagatatactcggcagtcagacagtgggtgataaggtccattgtcaaaagggaaacagcccagaccatcagctaaggtcccaaaatatatactaagtggaaaaggatgtggagatgtccagacaactaggaggttggctcagaagcagccatcctttaaagagtgcgtaacagctcactagtcgaatgactctgcgccgataatttaccggggctaagtatattaccgaagctatggatttacgcgtaagcgtgagtggtaggggagcgttctatgtgcggagaagcggtaccgtaaggagccgtggagcgcatagaagagagaatgccggtgtgagtagcgaaacgtgggtgagaatcccacgcaccgaaaacccaaggtttccagaggaaggttcgtccgctctgggtaagtcgggacctaaggcgaggccgagaggcgtagtcgatggacaacaggtagagattcctgtacttacggtatgaatgatggagtgacggagaaggctagcggatcctgctgatggaaatgcaggtgcaagcgaggtagccgacagccaggcaaatccggctgtcgaaaggcaaaggcgtgaggcgtatggaaagctgcggcaagtacagaagtccgtgaagccagcttccaagaaaagcttctagtgataatcatacagtaacccgtaccgaaaatggacacacatgggtgaggagagaatcctaaggtgagcgagagaactatagctaaggaactctgcaaaatgactccgtaacttagggataaggagtgctcatagagatatgagccgcagtgaaacggcccaagcgactgtttaccaaaaacacagctctatgctaagtcgaaagacgacgtatatggggtgacgcctgcccggtgctggaaggttaagaggatgtgtcagcgcaagcgaagcattgaattgaagccccagtaaacggcggccgtaactataacggtcctaaggtagcgaaattccttgtcaggtaagttctgacccgcacgaaaggcgtaacgatttgggcgctgtctcagctgtagactcggtgaagtcttagtacctgtgaagatgcaggttacccgcgactagacggaaagaccccatggagctttactgtagcttgatattggactttgatgcaagatgtacaggataggtaggagactgagagacatgcacgccagtgtgtgaggagtcaatgttgggatactactcttcttgtattggagttctaaccggatgccatggaactggcaacgggacagtgtcaggtgggcagtttgactggggcggtcgcctcccaaagagtaacggaggcgcccaaagataccctcagcttggatggaaatcaagcgcagagtgcaaaggcataagggtgtttgactgcgagacctacaagtcgagcagggacgaaagtcgggcttagtgatccggcggtgctgaatggaaaggccgtcgctcaacggataaaagctaccctggggataacaggctgatctcccccaagagttcacatcgacggggaggtttggcacctcgatgtcggctcatcgcatcctggagctgaagtcggttccaagggttgggctgttcgcccattaaagcggtacgcgagctgggttcagaacgtcgtgagacagttcggtccctatctgtcgtgggcgtaggaagtttgagaagatctgtcctcagtacgagaggaccgggatggacatatcaatggtgcaccagttgtcacgccagtggcacagctgggtagctaaatatggaagggataaacgctgaaggcatctaagtgtgaaacccacttcaagatgagacttcccattacgcaagtaagtaagaccccttaaagacgataaggttgataggtcaggagtgtaagcatggcgacatgttcagcggactgatactaataggtcgaggacttaacctagagaaaaagggttaaggcttgaaactgaaagaagacaaagtggaagacaaaagacgcaagaaaactattatctagttttgagtgattctcgaaaggaattgcttagaaaagaagatctggtagcgatagcatgatggacacacctgttcccataccgaacacagaagttaagcatcataacggcgaagatagtaccaaggtgcgacaatagcaagctgccggttctttttttatttacggatacctctgcgtatcctttttttattttatatccggctttaatataagcagttctggatgaattatgtcgtctatcatcgacttactgctatagttttaattagcccgggttaacagctgttattaagataataacagctgttgtgatttttcctgcaggatcaggatagattatctaaggcaggtaaaaatatttatgatcgtgcaggcgataaagtaaactctaacagagctggtacaggcattttatttaaaataagagcgtttggcgaagaatcagataaaatatcagcagacatgatgtttttgcgttgtattgaaaaatagacctgtttttaattctttaaaaaaagaagtgacggttaataaaatagctatatttaataaaaaaataaaatcagaaaagagtcgaaaaaatgggagaaaaaagggaagtcacaaaataatgtgaaaataactctttacaagacaaaagggatatggtaaattaaataggcactcgaggaaagggacgtaaggaccggagagaaaaagcaaaaaaagttaaaaaaaagattgactaaaaagcgaaaagagtgtaagatattcaagtcggcaaaagaagccggagagatcattgaaaactaaacagaattaagaaacacacgtcaatatccagaaggataaaaaagaaaaaagagctaaacaaacgaagagttgtttaaataaacaatggagagtttgatcctggctcaggatgaacgctggcggcgtgcctaatacatgcaagtcgaacgcgagcacttgtgctcgagtggcgaacgggtgagtaatacataagtaacctgccctagacagggggataactattggaaacgatagctaagaccgcataggtacggacactgcatggtgaccgtattaaaagtgcctcaaagcactggtagaggatggacttatggcgcattagctggttggcggggtaacggcccaccaaggcgacgatgcgtagccgacctgagagggtgaccggccacactgggactgagacacggcccagactcctacgggaggcagcagtagggaattttcggcaatgggggaaaccctgaccgagcaacgccgcgtgaaggaagaaggttttcggattgtaaacttctgttataaaggaagaacggcggctacaggaaatggtagccgagtgacggtactttattagaaagccacggctaactacgtgccagcagccgcggtaatacgtaggtggcaagcgttatccggaattattgggcgtaaagagggagcaggcggcagcaagggtctgtggtgaaagcctgaagcttaacttcagtaagccatagaaaccaggcagctagagtgcaggagaggatcgtggaattccatgtgtagcggtgaaatgcgtagatatatggaggaacaccagtggcgaaggcgacgatctggcctgcaactgacgctcagtcccgaaagcgtggggagcaaataggattagataccctagtagtccacgccgtaaacgatgagtactaagtgttggatgtcaaagttcagtgctgcagttaacgcaataagtactccgcctgagtagtacgttcgcaagaatgaaactcaaaggaattgacgggggcccgcacaagcggtggagcatgtggtttaattcgaagcaacgcgaagaaccttaccaggtcttgacatactcataaaggctccagagatggagagatagctatatgagatacaggtggtgcatggttgtcgtcagctcgtgtcgtgagatgttgggttaagtcccgcaacgagcgcaacccttatcgttagttaccatcattaagttggggactctagcgagactgccagtgacaagctggaggaaggcggggatgacgtcaaatcatcatgccccttatgacctgggctacacacgtgctacaatggatggtgcagagggaagcgaagccgcgaggtgaagcaaaacccataaaaccattctcagttcggattgtagtctgcaactcgactacatgaagttggaatcgctagtaatcgcgaatcagcatgtcgcggtgaatacgttctcgggccttgtacacaccgcccgtcacaccacgagagttgataacacccgaagccggtggcctaaccgcaaggaaggagctgtctaaggtgggattgatgattggggtgaagtcgtaacaaggtatccctacgggaacgtggggatggatcacctcctttctaaggagaaacgcatgatcgaagatgatgcacaagagaagtgatgtttcgaagatactgtttagttttgagtgatactcaggtatgactcagagatcattgaaaactggataatagaaaataaattgcgatagaaatagaaaatgagatcgaaatagtaattgttattattgaggtctttctagaaaagtcgaaaactaagaattttcatcactaaaaaacataaatcgaaacggatggatggattttagtaaatagttgaaaatagtaatcaagcaaacaccaaaataggtaaagtaagaaagagcgtatggcggatgcctaggcacagagaggcgaagaaggacgcagcaaacagcgaaatgcgacggttagcagtaagcatgcaacgatccgtcgatgtccgaatgggggaacccacctggagtagagaccaggtatcctgaagtgaataaatagcttcagagaggcgagactcagggaactgaaacatctaagtacctgaaggaagagaaaataaacgaatgattccctaagtagcggcgagcgaaaggggaagagcccaaaccgatcttaggatcggggttgtaggactgtcggcaaagagcaagaaatcattataggcgaacggaatgggaagtccggcgaaacagggtgacagccccgtagccgaaatagtgaagaagcacgagacagcacctgagtacggcgggacacgaggaatcctgtcggaatccaccaggaccatctggtaaggctaaatactcctctgtgaccgatagtgaaccagtaccgtgagggaaaggtgaaaagaaccccgggaggggagtgaaatagaacctgaaaccatatgcttacaagaagttagagcccgttaaagggtgatagcgtgccttttgtagaatgaaccggcgagttacgatatggagcgaggttaagcaggatatgcggagccgaagcgaaagcgagtcttaacagggcgaaagttgcatgtcgtagacccgaaaccgagtgatctagccatgaccaggttgaagttggggtaaaacccgatggaggaccgaaccgacccccgttgaaacgttggcggatgagttgtggctaggggtgaaattccaatcgaactcggagatagctggttctccccgaaatagctttagggctagcgtcgaggtaaagtcgtgtgaaggtagagcactgaatatgtgatggccccatctcggggtactgaacataatcaaactccgaatgtcacaaagatatactcggcagtcagacagtgggtgataaggtccattgtcaaaagggaaacagcccagaccatcagctaaggtcccaaaatatatactaagtggaaaaggatgtggagatgtccagacaactaggaggttggctcagaagcagccatcctttaaagagtgcgtaacagctcactagtcgaatgactctgcgccgataatttaccggggctaagtatattaccgaagctatggatttacgcgtaagcgtgagtggtaggggagcgttctatgtgcggagaagcggtaccgtaaggagccgtggagcgcatagaagagagaatgccggtgtgagtagcgaaacgtgggtgagaatcccacgcaccgaaaacccaaggtttccagaggaaggttcgtccgctctgggtaagtcgggacctaaggcgaggccgagaggcgtagtcgatggacaacaggtagagattcctgtacttacggtatgaatgatggagtgacggagaaggctagcggatcctgctgatggaaatgcaggtgcaagcgaggtagccgacagccaggcaaatccggctgtcgaaaggcaaaggcgtgaggcgtatggaaagctgcggcaagtacagaagtccgtgaagccagcttccaagaaaagcttctagtgataatcatacagtaacccgtaccgaaaatggacacacatgggtgaggagagaatcctaaggtgagcgagagaactatagctaaggaactctgcaaaatgactccgtaacttagggataaggagtgctcatagagatatgagccgcagtgaaacggcccaagcgactgtttaccaaaaacacagctctatgctaagtcgaaagacgacgtatatggggtgacgcctgcccggtgctggaaggttaagaggatgtgtcagcgcaagcgaagcattgaattgaagccccagtaaacggcggccgtaactataacggtcctaaggtagcgaaattccttgtcaggtaagttctgacccgcacgaaaggcgtaacgatttgggcgctgtctcagctgtagactcggtgaagtcttagtacctgtgaagatgcaggttacccgcgactagacggaaagaccccatggagctttactgtagcttgatattggactttgatgcaagatgtacaggataggtaggagactgagagacatgcacgccagtgtgtgaggagtcaatgttgggatactactcttcttgtattggagttctaaccggatgccatggaactggcaacgggacagtgtcaggtgggcagtttgactggggcggtcgcctcccaaagagtaacggaggcgcccaaagataccctcagcttggatggaaatcaagcgcagagtgcaaaggcataagggtgtttgactgcgagacctacaagtcgagcagggacgaaagtcgggcttagtgatccggcggtgctgaatggaaaggccgtcgctcaacggataaaagctaccctggggataacaggctgatctcccccaagagttcacatcgacggggaggtttggcacctcgatgtcggctcatcgcatcctggagctgaagtcggttccaagggttgggctgttcgcccattaaagcggtacgcgagctgggttcagaacgtcgtgagacagttcggtccctatctgtcgtgggcgtaggaagtttgagaagatctgtcctcagtacgagaggaccgggatggacatatcaatggtgcaccagttgtcacgccagtggcacagctgggtagctaaatatggaagggataaacgctgaaggcatctaagtgtgaaacccacttcaagatgagacttcccattacgcaagtaagtaagaccccttaaagacgataaggttgataggtcaggagtgtaagcatggcgacatgttcagcggactgatactaataggtcgaggacttaacctagagaaaaagggttaaggcttgaaactgaaagaagacaaagtggaagacaaaagacgcaagaaaactattatctagttttgagtgattctcgaaaggaattgcttagaaaagaagatctggtagcgatagcatgatggacacacctgttcccataccgaacacagaagttaagcatcataacggcgaagatagtaccaaggtgcgacaatagcaagctgccggttctttttttatttacggatacctctgcgtatcctttttttattttatatccggctttaatataagcagttctggatgaattatgtcgtctatcatcgacttactgctatagttttaattagcccgggttaacagctgttattaagataataacagctgttgtgatttttcctgcaggatcaggatagattatctaaggcaggtaactatataaaattcaagtgtttttatgaaaaagttagaaaatgttaaaataaatgattttatatgttaagtagtatagatccttgaaatgtgaataatgatttgtaatttttgggcatgacgaaaagaaccaaaattggcctttttttaattttaatgcatttattttatcttaaaagtgcatcatcaaattgttgattggtacttgaaagatgataaataattctaagcaattttctaacacaatgtccacaagcacaatgatgacctttaccttgagaaatctttaaatcataatattgtttaaataccggattattattattaatcacaggcaatatgatctgatataaagtctttctcaaatatggtgaacctttcttggtaatagcagtatgttgtgcgtcgtattgacttgattcgtaatgataaggagcaacaccagctgcttttattatcttagatggcttagaatagttgcttatctctcctaattcggctaaaatagaagtaccagagaaatgagaaatccctgggatggataggataggagagttattttggatggaaaactcttctatttttttatctgtttcagctaactgttcattgataagttcaatctgacttatcagatgtttgattttgattacttctgctgctgatgaaattccaatagaagatttagcagagtctttaagctgctgtgcagttagagatatgcggttccctcggccttttatttcaaaacatttgcgaatagttctaatatcagtactagcgatattttcagcactgccaaatgttttaagtacattcatgtagataatgccgtatttagatgaaaataagctgttgaattcagggaaaacaatatcaatacatttttgtaggcggtttgtataaacattgagttcttcttttaaattgtgatgatgtctagttaattgcttttgttcataaagatcgaagctgttgacttttgtaatacgatactgcttttttcgtacaggagtatccaaaacatcacagatagtaagagtgtcaagtttatcattcttagtgatgccgttctgcattttacgagtgtaatcagtagttttagggttgataagagcaacagtaaaatttttttctaaaagatactttaataaagcaaaataataatgcccggtgtcttccataccaatcaatatagagtccttagaataagaactaagtttttggattagagaatcaaatccatctttagtattggaaaaagaagaaggttgaagtaaaacttcaccactatctttgtccataatacaaaagaagtgttttttttccaatatcgataccaactaatttcataataaaagatcctttcttgataaaaatatgtgaaaaggtatccacaacacttagaccacaaaacctggtgcaaaatacgaattcaagactcatctaactaatcattatttaggaataaggttgtggtaagggcctgcctaaagtagtcatgctacaaggtgaaaaaatacaaatccacatttacatattaaatattttacaaattaacttaaccgtaatcaaccacggtttaaatggttgatagaaaggagaaggtatatttgtagatgactattaaatgagtcaattacaatataccaggtaaaaatatttatgatcgtgcaggcgataaagtaaactctaacagagctggtacaggcattttatttaaaataagagcgtttggcgaagaatcagataaaatatcagcagacatgatgtttttgcgttgtattgaaaaatagacctgtttttaattctttaaaaaaaagaagtgacggttaataaaatagctatatttaataaaaaaataaaatcagaaaagagtcgaaaaaatgggagaaaaaagggaagtcacaaaataatgtgaaaataactctttacaagacaaaagggatatggtaaattaaataggcactcgaggaaagggacgtaaggaccggagagaaaaagcaaaaaaagttaaaaaaaagattgactaaaaagcgaaaagagtgtaagatattcaagtcggcaaaagaagccggagagatcattgaaaactaaacagaattaagaaacacacgtcaatatccagaaggataaaaaagaaaaaagagctaaacaaacgaagagttgtttaaataaacaatggagagtttgatcctggctcaggatgaacgctggcggcgtgcctaatacatgcaagtcgaacgcgagcacttgtgctcgagtggcgaacgggtgagtaatacataagtaacctgccctagacagggggataactattggaaacgatagctaagaccgcataggtacggacactgcatggtgaccgtattaaaagtgcctcaaagcactggtagaggatggacttatggcgcattagctggttggcggggtaacggcccaccaaggcgacgatgcgtagccgacctgagagggtgaccggccacactgggactgagacacggcccagactcctacgggaggcagcagtagggaattttcggcaatgggggaaaccctgaccgagcaacgccgcgtgaaggaagaaggttttcggattgtaaacttctgttataaaggaagaacggcggctacaggaaatggtagccgagtgacggtactttattagaaagccacggctaactacgtgccagcagccgcggtaatacgtaggtggcaagcgttatccggaattattgggcgtaaagagggagcaggcggcagcaagggtctgtggtgaaagcctgaagcttaacttcagtaagccatagaaaccaggcagctagagtgcaggagaggatcgtggaattccatgtgtagcggtgaaatgcgtagatatatggaggaacaccagtggcgaaggcgacgatctggcctgcaactgacgctcagtcccgaaagcgtggggagcaaataggattagataccctagtagtccacgccgtaaacgatgagtactaagtgttggatgtcaaagttcagtgctgcagttaacgcaataagtactccgcctgagtagtacgttcgcaagaatgaaactcaaaggaattgacgggggcccgcacaagcggtggagcatgtggtttaattcgaagcaacgcgaagaaccttaccaggtcttgacatactcataaaggctccagagatggagagatagctatatgagatacaggtggtgcatggttgtcgtcagctcgtgtcgtgagatgttgggttaagtcccgcaacgagcgcaacccttatcgttagttaccatcattaagttggggactctagcgagactgccagtgacaagctggaggaaggcggggatgacgtcaaatcatcatgccccttatgacctgggctacacacgtgctacaatggatggtgcagagggaagcgaagccgcgaggtgaagcaaaacccataaaaccattctcagttcggattgtagtctgcaactcgactacatgaagttggaatcgctagtaatcgcgaatcagcatgtcgcggtgaatacgttctcgggccttgtacacaccgcccgtcacaccacgagagttgataacacccgaagccggtggcctaaccgcaaggaaggagctgtctaaggtgggattgatgattggggtgaagtcgtaacaaggtatccctacgggaacgtggggatggatcacctcctttctaaggagaaacgcatgatcgaagatgatgcacaagagaagtgatgtttcgaagatactgtttagttttgagtgatactcaggtatgactcagagatcattgaaaactggataatagaaaataaattgcgatagaaatagaaaatgagatcgaaatagtaattgttattattgaggtctttctagaaaagtcgaaaactaagaattttcatcactaaaaaacataaatcgaaacggatggatggattttagtaaatagttgaaaatagtaatcaagcaaacaccaaaataggtaaagtaagaaagagcgtatggcggatgcctaggcacagagaggcgaagaaggacgcagcaaacagcgaaatgcgacggttagcagtaagcatgcaacgatccgtcgatgtccgaatgggggaacccacctggagtagagaccaggtatcctgaagtgaataaatagcttcagagaggcgagactcagggaactgaaacatctaagtacctgaaggaagagaaaataaacgaatgattccctaagtagcggcgagcgaaaggggaagagcccaaaccgatcttaggatcggggttgtaggactgtcggcaaagagcaagaaatcattataggcgaacggaatgggaagtccggcgaaacagggtgacagccccgtagccgaaatagtgaagaagcacgagacagcacctgagtacggcgggacacgaggaatcctgtcggaatccaccaggaccatctggtaaggctaaatactcctctgtgaccgatagtgaaccagtaccgtgagggaaaggtgaaaagaaccccgggaggggagtgaaatagaacctgaaaccatatgcttacaagaagttagagcccgttaaagggtgatagcgtgccttttgtagaatgaaccggcgagttacgatatggagcgaggttaagcaggatatgcggagccgaagcgaaagcgagtcttaacagggcgaaagttgcatgtcgtagacccgaaaccgagtgatctagccatgaccaggttgaagttggggtaaaacccgatggaggaccgaaccgacccccgttgaaacgttggcggatgagttgtggctaggggtgaaattccaatcgaactcggagatagctggttctccccgaaatagctttagggctagcgtcgaggtaaagtcgtgtgaaggtagagcactgaatatgtgatggccccatctcggggtactgaacataatcaaactccgaatgtcacaaagatatactcggcagtcagacagtgggtgataaggtccattgtcaaaagggaaacagcccagaccatcagctaaggtcccaaaatatatactaagtggaaaaggatgtggagatgtccagacaactaggaggttggctcagaagcagccatcctttaaagagtgcgtaacagctcactagtcgaatgactctgcgccgataatttaccggggctaagtatattaccgaagctatggatttacgcgtaagcgtgagtggtaggggagcgttctatgtgcggagaagcggtaccgtaaggagccgtggagcgcatagaagagagaatgccggtgtgagtagcgaaacgtgggtgagaatcccacgcaccgaaaacccaaggtttccagaggaaggttcgtccgctctgggtaagtcgggacctaaggcgaggccgagaggcgtagtcgatggacaacaggtagagattcctgtacttacggtatgaatgatggagtgacggagaaggctagcggatcctgctgatggaaatgcaggtgcaagcgaggtagccgacagccaggcaaatccggctgtcgaaaggcaaaggcgtgaggcgtatggaaagctgcggcaagtacagaagtccgtgaagccagcttccaagaaaagcttctagtgataatcatacagtaacccgtaccgaaaatggacacacatgggtgaggagagaatcctaaggtgagcgagagaactatagctaaggaactctgcaaaatgactccgtaacttagggataaggagtgctcatagagatatgagccgcagtgaaacggcccaagcgactgtttaccaaaaacacagctctatgctaagtcgaaagacgacgtatatggggtgacgcctgcccggtgctggaaggttaagaggatgtgtcagcgcaagcgaagcattgaattgaagccccagtaaacggcggccgtaactataacggtcctaaggtagcgaaattccttgtcaggtaagttctgacccgcacgaaaggcgtaacgatttgggcgctgtctcagctgtagactcggtgaagtcttagtacctgtgaagatgcaggttacccgcgactagacggaaagaccccatggagctttactgtagcttgatattggactttgatgcaagatgtacaggataggtaggagactgagagacatgcacgccagtgtgtgaggagtcaatgttgggatactactcttcttgtattggagttctaaccggatgccatggaactggcaacgggacagtgtcaggtgggcagtttgactggggcggtcgcctcccaaagagtaacggaggcgcccaaagataccctcagcttggatggaaatcaagcgcagagtgcaaaggcataagggtgtttgactgcgagacctacaagtcgagcagggacgaaagtcgggcttagtgatccggcggtgctgaatggaaaggccgtcgctcaacggataaaagctaccctggggataacaggctgatctcccccaagagttcacatcgacggggaggtttggcacctcgatgtcggctcatcgcatcctggagctgaagtcggttccaagggttgggctgttcgcccattaaagcggtacgcgagctgggttcagaacgtcgtgagacagttcggtccctatctgtcgtgggcgtaggaagtttgagaagatctgtcctcagtacgagaggaccgggatggacatatcaatggtgcaccagttgtcacgccagtggcacagctgggtagctaaatatggaagggataaacgctgaaggcatctaagtgtgaaacccacttcaagatgagacttcccattacgcaagtaagtaagaccccttaaagacgataaggttgataggtcaggagtgtaagcatggcgacatgttcagcggactgatactaataggtcgaggacttaacctagagaaaaagggttaaggcttgaaactgaaagaagacaaagtggaagacaaaagacgcaagaaaactattatctagttttgagtgattctcgaaaggaattgcttagaaaagaagatctggtagcgatagcatgatggacacacctgttcccataccgaacacagaagttaagcatcataacggcgaagatagtaccaaggtgcgacaatagcaagctgccggttctttttttatttacggatacctctgcgtatccttttttctttgcaattattatagattgcgctattatatttattaaagatggaggatgcggtatgaaagtattattaattaatggaagttttagaagaaatggctgtacttttacagctttgaatgaagttgctaaagcattaaatactaatggtattgatactgaaatatttcatattggaacaaaagctattaggggttgcatgggatgtggtgtttgccatgagaaaggtgaatgtatagataacagtgatgctgttaatgagtgtttaaaactatttgaagctgctgatggaattgtgataggaagtcctgttcattatgcaagctcttctggaatgattgcttcctttatggatcgtctattctatgcttcaagattcgataaacgttttaaagttggtgccactgtagttagttgtcgccgaggcggtgccagtgctacttttgatcaattaaataaatattttacaatcgctcaaatgccgattgtatcttcgcaatattggaatagcgtacatggtaatacacccgaagaagtaaaacaagattttgaaggaatgcagacaatgaaagtattaggtaataatatggcattcttactcaaaagtattgctttaggtaaagaaaaacatggtttacctgatgcagaactaaaaatagcaactaattttatcagataggagtattagaatgacacgaatttatttattacgtcatgggcaaactttatttaatcaaaaaaatctaatccaaggaagttgtgattctaaattaacagctaaaggaatagcccaggctaaagctgttaaggaatatttagatacaataaattttgcagctgtttattgttcaacaagtgaaaggacattggatactgcgacatatgcaactggtggaaaatatccgatctacccatgtaaagaattcaaggaaattgattttggagtagttgaaggtgaagatggtagtcagttatttaaaggaatgaaacatgataattttgtatcattactgttaaatgaaggatggagttctttagaaggagaaagcggttttgattttacgaaacgaattttcacaaaactagatgagataactgctcaatatcctgacgagaatatattaattgcgactcacgggggcacgattttaaatacagtagttaacattgaccataattttgttaatatggatggtccagctaattgctcgatcaccattattgattgtcatggtgaatatcgagtgattgaatataacttacaggttgctcagtagattaaaaatagcatgattaaatgaagaaaaattaattaaaataaatgaaaaaaagccttgcaataggggcttttttttgttaaaatactaccgttgacgttgcaaagatgtgcgaggttgctgaaacaccgaaaggcgttgtcatgaaacggcatgtttcagggaattcgtattgagtaagtcacatcctataagttgaaaggagaaaaatcatggcaaataacaaaattagaattagattaaaatcatttgatcacaaaattctagataactcagcagaaaaaattattggtgctgctaagaaatctggagctcaagtagtaggtcctgtacctctaccaactgaaaaagaaatttatacagtattaagagcggttcacaagtataaagattctcgtgaacaatttgaaatcagaactcacaaacgtttaatcgacattgtgaatcctacacaagaaacagttgacattctaacaagattagaattaccaagtggtgtagacatcgaaattaaattataagaaaggtaaaaggtgtaactcatgaaaggaatcttaggtcgtaagattggaatgactcaagtcttcacaactgatggtttattaatcccagtaactgtagtagaagctgatgctaacgttgtattacaaaagaaaacagttgctactgatggatatgatgcaatccaagttggattcgaagataagagagaaaaattagctaataaagctgaattaggtattgtgaaaaaagctaacacagctcctaagcgcttcattaaagaatttcgttatgacgaaatgatgagttatgaagttggagataaaattactgttgatagcttcgtagcaggtgaagttgtagatgtaactggaacttctaaaggtaaaggttatcaaggtgttattaaaagacatgggcaaagaatcggtcctaaaggacatggttcaggagctcatagaattgttggttcaatgggaccaatcgctccaaacagaattgctccaggtaaaaaattaccaggacaaatgggacatgtaacaagaacagtacaaaacttagaagtggtagctgttgatgtagaaaataatttattattaatcaaagggtcagtacctggacctaaaaaaggattagtaattgtaaaatctggaattaaagcagctggtaaagtaaacgaagctcatgaattagtagactttacaccagtagtagaagaaactaaagaagcagatgcagcaactgaaacaccagttgaagcagctgaataatttagggaaggaggattcgatatgcttacagttaaagtatataaccaagaaggttctgaagtaaaagatttagaattaaatgaagctgtatttgggattgaaccaaataaacaagcattatttgatatggtcttattacaaagagcatcattaagacaaggtactcataaagtaaaaaaccgtactgaagttcgtggtggtggtaaaaaaccatggcgtcaaaaaggtactggtagagctagacaaggatcaatccgtgcaccacaatggcgtggaggaggagttgtatttggtccaacacctagaagttataaatttaaattaaatcgtaaagttagaagattagcgcttaaatcagcactatctactaaaattaacgataatgaattcatggctttagaagctattaaattcgacgctccaaaaacaaaagaaatggtgaaagtattagcaaatttagaagcaccagttaagacattgatcgttgttgacgaaatttgtccaaacgttgctagaagtgctaacaacatcccaggcgttaaattattagatgcaaaacatgtaaatgtttatgatatcttaaacagcaacaagttaatcatgactgaagctgctattaaatctgttgaggaggtactaggataatggcacacattacagatgtattaaaaaaaccagtacttactgaaaaaacaatgactcttcaagcaaacgaaaacaaatacacgtttgatgtagatgttaatgcaaataaagttgaaatcaaacaagctgttgaagcaatgtttggtgtgaaagttgaaagtgttaatgttatgaacgttaaacctaaaactaagagaatgggtagatacgaaggtaaaactaatcgtagaagaaaagctatcgttaaattagctgaaggtaacgaaatcaattatttcggtgaggaataattaactaaaatattggaatacataattccagataactaggaggaaactaaagatggcaattaaaacttataagccagtgacgaatggtcgtcgtaatatgacttcattaacttatgaagaaattacaacaaataaacctgagaaatctttagttgcaaaagtaagcaaaaacggtggacgtaataaccaaggtgttattacaacacgtcatcatggtggaggacataaacgtaaatatcgtattattgacttcaaacgtaataaagatgatatcgttggaactgtagcaactatcgaatatgatccaaatagatcagcaaacatcgcattaattaactatgcagatggtgaaaaaagatatattttagctccaaaaggattagaagttggaagtaagatcgtatctggtgaaaacgcagatattaaagtaggaaatgctttaccaatgggaaatatgcctgaaggtactgtaatccacaatatcgaaatgcaacctggtaaaggtggacaaatcgcacgttctgctggtgtgtctgctcagatcttaggtaaagaagaaagatatgtaatcgtaagattagcatctggtgaagtacgtaaattattagctgtatgtagagctactgttggggttgttggaaacgaagaccacggattagttaactatggtaaagctggacgtatgagatggaaaggtgttaaacctacagtacgtggttctgtaatgaaccctaacgatcaccctcatggtggtggtgaaggtagaacttctatcggacgtaaagctccaatgacaccttggggtaaaaaagcaatgggtgttaaaactagaaaaaataagaaagcgtctactaaattaattgtacgtcgcagaaattctaaataataagaggaggaagaaataatggcacgtagtttaaaaaagggaccatttgttgatggacacttaatgaaaaaagttgaagcattaaacgctgctggtaaaaaagaagttatcaaaacttggtctagacgttcaacaatcttccctcaatttattgagcatacatttgcagtgtataacggaagagaacatatcccagtttatgtaactgaagatatggtcggtcataaattaggagaattcgctccaacaagaacttatcacggtcacggggctgatgataaaaaagctggaaaatagagagaggagattttaaaacatggaagcaagagcacaagctaaaatgattcgtgtttcacctcaaaaagctcgattagtcgttgacttagtgagagggaagcaagtaaaagaagcacttggtatgttagaatacgtaaataaaagtgcaactcctgcaatcattaaagttgtaaaatctgctgcacaaaacgctgtttataacgaaggtgcagaagcagaaaagttatatattaaagaaatctatgtagacgaaggtcctacattaaaaagattcgctgcaagagctaaaggtagcggaacaagaattttaaaaagaactagccacatcacttgtgtggtagaagaaagataggaggtcacattatgggtcaaaaagtaagtccaatcggattacgagttggtgttaaccgtaattgggattcaagatggtatgctaacgatcaagatttcgcaggtttattacatgaagatatcaagattcgtgaatacctattaaaaaaacttaagactgcatctgtagctaaagttgaaatcgaaagatcaaaaaatcgtgttactatctttgttcacacatctagaccaggagttgtaatcggtaaagatggtgaagcagttgatgcattaagaaaagaagttagtaaaatggtaaaagataaacaagtgtttatcaatattgtggaaatcaaaaaccctgatgttgtagcacaattagttgctaataatattgcggaacaattagaaaatcgtgcttcttttagaacagttcaaaaacgtgctatccaaagagcaatgagagctggagctaaaggaattaaaacaagtgtttcaggacgtttaggtggagctgatatggctcgtgctgaaggttactctgaagggaatgtccctcttcatactttaagagctgatattgattatgctactgcagaagcagatactacttatggtaaattaggagttaaagtttggatttgtaagggagaaatccttcctgaaaagaagaaaggggataaataatcatgttgatgcctaaaagaacaaaatacagaagacctcatcgtgttaaatatgaaggtaaagctaaaggcggaactgaagtatcatttggtgaatatggtttacaagcaactgaaggtgcttggatcacttctcgtcaaatcgaagctgctcgtattgctatcaaccgtcgtttaaaccgtggtggacaagtatggattagaattttccctcacttagctaaaactaaaaaaccattagaagtacgtatgggatctgggaaaggttctccagaagaatgggtagcagttgttaaaactggtcgtgttcttttcgaagttgcaggtgttgatgaagaacttgctagagaagctttaagacttgcatctcataaattacctattaaatgtaaaatcattggaaagggtgaatagtcatgacagttcaagaaatcaaagaattagataacgctgctttacttgctaaagtagaagaatacaaaaaagagctatttggacttcgcttccaacaagctacaggaagtttagaaaacacagcacgtattagaacggttcgtaaatctatcgctagaattaaaacaattattagagaaagagaattgaaccaataggaggagatacaatggaaagaaacaatcgtaaagtttatactggtacagttgtatctactaaaatggataaaactattacagtgcaagtagaaacacatgtaaaacataaattatatggtaaacgtatgaaatcaacaactaagtttcatgcccatgatgaagaaaatatcgctagtgttggcgatacagtaaaaatcatgtcaacaagaccattatctgcaacaaaacgtttccgtttagtagaaatcgttaaaaaagcagaaactgtttaatatatattaaaactctaaaaggaggtaaccaagaatgatccaaaacgaaagtagacttaaagtcgctgacaacactggagctaaagaagtattagtaatccgtaatttaggtggttctaatcgtaaatttagtaacatcggtgatgttgttgtagcaacagttaaacaggcagcaccaggtggttcagtaaaaaaaggtgaagtagtaagagcggttatcgtaagaagtagatatggagtcggaagagaaaacggttcttatattaaatttgatgacaacgcttgtgtaattataaaagaagataaatctccaaaagggactcgtatcttcggaccagttgcaagagagttaagagatgctgatttcatgaaaatcgtatcattagctccagaagtattataggaggaacttaaaacatgaaaatccgtgtaggtgatactgtagaagttatcgcaggtaaagataaaggaaaacaaggtgaagtgttacaagttcttgcaaaacaagacaaagtaatcgttgaaggagttaatactgtaactaaacatattaaaccttcacaagcagatcctgaaggtggaattgtaacaagagaagctcctattcatgtttctaatgttgcattctatgattcaaaagctaaagctcctgttaaacttggatataaaatcgttgaaaaagacggtaagaaaacaaaagttcgagttaacaaaaaaactggagcagaagtagataaaaagaaaaagaaataatggaggaggataaagaatgaaccgtttaatggaacgttatcaaaacgacgtagtaaaatcattggtagaaaaattcaattattcttctagcatgcaagctccaaaggttgaaaaaatcgttttaaatatcggtgttggtgatgcagtttctaactctaaattattagatgaagctgttaatgaattaacattaattactggacaaaaaccagttatcactagagctaaaaaatcaatcgctggatttaaattacgtgaaggtgctccaatcggatgtaaggtaactttacgtggtgaaagaatgtatgaatttttagataaattagtaaatatctcattgccacgtgtaagagattttagaggtgtatcaaataactcatttgatggaagaggaaattacactttaggtattaaagaacaattaattttcccagaaatcaatttcgataaagtaaacaaattaagaggaatggatatcgtattcgtaactacagctaagagcgatgaagaaggtcgcgagttattagctcaattaggaatgccattcaagaaataaggaggactcacaaaaatatggcaaaaacatcaatgaaagtgaaacaacaacgtcctcaaaaatacaaagtgcgtgaatacacacgttgtgaacgttgtggaagaccacattcagtaattagaaaattcaaactttgtagaatttgcttccgcgaattagcttacaaaggtgaaattccaggtgtaaagaaagcaagctggtaattagattttatccagatggaaggaggattagcaaatggttatgacagatccaattgcagatatgttaacaagaatccgtaatgcaaatagacaacatcacgaaacagtaatggtgcctgcatcaaaattaaaagctgatattgctgaaattttgaaaaacgaaggattcattaaaggatataaagttgagggcgaaggtccaatcaaaaacattaatatcactttaaaatatagaggaaatgatagagtaatcactgatttaaaaagaatttctaaaccaggattacgtgtatatgctaaagtaaacgaaattcctaaagtattaaatggtttaggtattgtaatcttatcaacttctcaaggtttgatgacagataaagaagctcgcgctaaacaagttggtggcgaagttcttgcatatatttggtaataaaaaatacaattcaggaggtgcaaactgatgtctcgtgtcggtaataaaattattaatgtacctgaaggagttacagttgatatcgctgctgataatacagtaactgttacaggagctaaagggactttagtaagacaattttcaccagtaattacaattaacaaagaagataatgtaatcactgttgctagaagtagtgaacaaaaaactcataaacaattacatggtacaacaagagcattgcttgcaaacatgattgaaggagttcatgaaggattcaaaaaacaattagaaatagttgggattggatatcgtggacaaatgaaagggaatactttagtgttaaacattggatattctcatcaagtagagattgaagctgaagaaggagttacaattgaaactcctaacaatacaacaatcgttgtatctggaatctcaaaagaacgtgttggtcaagttgctgctcaaattagagaagtaagaaaaccagaaccttataaaggtaaagggattaaatatagtgatgaaagaatcatcagaaaagaaggaaaaactgctggtaagaagtagtttcgaaaggagcaaaataagatgtcaaaattacaatctcgtaatgatgttcgtttaaaaagacatgctagagttcgtgctaaaatcagtggaactcctgaatgcccacgtttaaacgtgttccgttcaaatgctcatattcatgcgcaagttattgatgatgttaacggtgttactttagcaagtgcatctagtgttgatatgaaattagaaaacggttctaacatcgctgctgcaactgcagtaggtaaagctgttggagaagcggcaatcgcaaagaatatcaaaaaagtagtatttgatcgtggtggatacgtttatcatggtcgtgtaaaagccctagctgaagctgctagagaagctggattagaattctagaaggaggtcaatatggaacaacgtaaaccaagaaacaatggaccaagaaacaacggacctagaagaggtcaaagaaacaatggacctagaagagaagaaaaagaatttgaagaacgtgttgttactattaaccgtgtaactaaagtagtaaaaggtgggcgtaaattccgctttgctgcattagttgtaatcggagatagaaaaggtagagttggtttcggtactggtaaagcaaacgaagtacctgatgcaatcagaaaagcttctgaaaatgcaaaaagaaatgttatcaacgttccttcagttcatggaactattcctcatgaagttactggtatttatggatcaggtagagtatttattaaacctgcttctcaaggtactggaatcatcgctgggggaccagttcgtgctgttgtagaattagctggttatagtgatattttatctaaatctttaggttctagaacacctattaacatggttagagctacaatggaaggtttagcttcattaaaaactgtaaaccaagttgctgaattaagagataaaaaagtagaagaaatttttggataggagggcgtaaaaaatggcaaaaacagttatgattacgcttaaaaaaagtccaattggttgtttaccaaaacaacgggctactcttaaagcgttaggtttaacaaaagtaaataaaaccgtagaaaaagaaaacaacgaattcattcaaggaatgatcaaagttgttggacacctaattaaagtagaagaaaaatagggaggtgtaaactaatgaaactacacgaattacaatacactgaaggtgctcgtaaaacaagaaaacgtgttggacgtggtacaagttctggtactggtaaaactgctggtagaggacaaaaagggcaaggcgctagatctggtggtggaaagaaacctggattcgaagggggacaaactccattattcatgcgtttaccaaaacgtggatttacaaactttaataaattagaatacgctattgttaatttagatcagttaaatacttttgaagcagggactgttgtatgtcctaaagcattaaaagaagctgggttaatcaaaaaagaattagatggtgttaaagtattaggtaatggaactttagaaaaagctattactgtaaaagctcataagttttctaaatctgctcttgccgcaatcgaagctgcaggtggaaaaaccgaggtgatctaagatgtttacatttttgaaaaatgttttcaaaaaaggtgaacttcgtcaaaaagtaattttcactctggggattctatttgtttatcgtctgggagctgcaattactattccgagtgtcaacactggagcattaagttctagtgatgccactaatgggatttttgggattatgaacttactaggtgggggaacattagagagattctctctattctcgctaggagtttcaccttacatcacttcttcaatcattattgaattattgtcaatggatgttattccggcattgagccaatggcgtaaagaaggtaataccggtaaaaagaaaaaagaccgggttacaagatatgtaacattattcttagcagcattacaaggtggcgtattaacttacgctttcgataatggatacaagattcttgcagattctagtatctggacatatatctatgttgtcttaattatgatggcaggtagtatgttagcagtatggttaggggatcaaattacaaataaagggattggtaatggggtatcattattaatcttcactgggattgtttcaaacttaccgagcagttttatttcaactttcaacaacttagttgatacttctggtaaagctggggatatgtggcttggaattgcctggtatgcattatttgtggtagtttatctttcaatcgtgatctttgttgttttcaatgaaggtgccgttagaaaaataccaataatttatgcaacaagctctaatacaacaatgagaactaaagatcaaactcatatgcctattaaaattaatagttcaggggttattccagttatctttgcttcatcagtattagcagcaccaagaacagtagttagttttatggaaactagcgatgttactaaatggatcaatacaatctttaattatcaagaaccagttggattcgtcttatatatcttgatgattattggatttacattcttctattctaacttacaaattgatgctgaaaaaatcagtgatgatttaaagaaaaacggtggagcaattccgggagttagaactggagttgatacaatgaaacacattaagacaattttaaacagagtaactgtggtaggatcattatcgttatgtatcattgcagcaattccaattattacaccagttatctggtcacaaacagcaaacgcatctttatcacttggtggtacaggtttaatcatcgttactggggttgcactagaaactgtaaaacaaattaaaactcatattacaagaaaagaatatcacggttatattcgtcgatagtataagaaagaaggggcaattatatgaacattattctaatggggccacctggagcgggaaaaggtactcaagcagctaatttagtgaaagagtatggacttactcacatttcaacaggagacatttttagaaaagcacttaaggagcaaactaaatatggagttattgcaaaatacttcatgcaatttggtcacttagttcctgatgattatactattcaaatggttagagaatatcttcaagaaaatgaatttccaaatggatttattcttgatggtttccctcgtactattattcaagctcgtgagttagaaagtattgctaaagaatttggatttgaaattgatgccgtaatcaatttagatatcgaattagatcgtttagtaccaagactttctggaagaagaacttgtaaagaatgtggtgcaagttaccacatcgaatataatccacctaaagttgaaggggtatgtgatgtttgtggtggtgagttgtatcaacggcctgatgaaagcgaagatgctgtaaaagtcagactggatacttatgaaaaacaaacaagtcctttaattgattattatacaatgaaaggacaaatcactaatataaatggtgatcaatctatggaagacgtctttaaggatatcaaagctagcctggaggttaaataatgattgttactaaagaccgtagagaaattgaattgatggctgaagctggaagaattgttgcattagtgcatgaaaagcttaaagaagttattgtcccaggaattacgacaaaacaaattgatgagatttgcgaaaaagtgattcgtgataataatgcaactccttcatttcttcacttatatggatttccaaacagtgtttgtacttcaattaatgaagtagtcgtacatggaattcctagtgatcgaaaattagaagaaggtgacatcatttcagttgatgttggggcttgttataaaggatatcacggagatagcgcgtggacttatgcagtcggtaaaatcagcgatgaagctaaacggctgatggaagtttgtgaagcttcattatacgctggattagaacaggttaaacctggtaatcgcttatcagatatttctcacgctgtgcaagtataccttgaagatcatggatgtactacaccgttagattatacagggcatgggattggtactgaggtacatgaagatcctgctgttcctaattatggtcaagctggtcgtggtccaagacttaaagcaggtatgacacttgcaatcgaaccgatggcacatctaggtggatgtgaaacggaagtattacaagatgattggacagttgtaacaaaagaccgctctttagcggctcattatgaacatacgatcgtcattactgatgacgggtatgaaatcttaacaaaactttaatttaagggagttgaaaacctatggcaaagaaagatgacgttcttgaagtagaagcaacggtacttgaaacattaccaaatgcaatgtttaaagtagcgttagaaaatggagtagaaatccttgctcacgtttctggtaaaatccgtatgcattacattcgcattttaccgggggacagggttacggtagaaatttctccatacgatttaacacgtgggcgaattacatttagacataaataaaacttaaatcttccaaaaggaggtagacaagatgaaagtaagaccatctgtaaaaccaatgtgtgataaatgcagagtaattaaaagaaaagggcgcgtaatggttatttgcgaaaaccctaaacataaacaaagacaaggttaattagtagttaattaggaggaaataaaatggctcgtattgctggagttgatatcccacgtgacaaacgtgtggttatctcattaacttatatctatggtatcggtaaaccaacagctcaagaaattttgaaaaaagttggaattaacgagaacactagagttaaagatttaactgaagatgaaatcggtacaattagaaaagaaatagaatcaattaaagttgaaggtgaccttcgtcgagaagtagctttaaacattaaacgcttaatggaaattggaagctacagaggaatccgtcatcgtaaaggacttcctgttcgtggtcaaaagactaaaacaaatgctcgtactcgtaagggtaaggcaaaaccaatcgcaggaaagaaaaaatagataggaggttgaactagaaatggcaaaagttaaacaagtacgtggtaaaaaacgtgcaaaaaagaatatcgcaaaaggtgtagcacatgttcattcaactttcaataatactattgtaacaattactgatgaacatggtaatgtattaacatggtctagtgctggtgcattaggatttaaaggttcaagaaaatctactccattcgctgcgcaaatggcttctgaagctgctgcaaaagcatcaatggatcacggagtaaaatctgtagaagtatgtgttaaaggtcctggaccaggacgtgaagcagctgttagagctttacaagctgctggattagaagtaactgcaatcaatgatgttactccaattccacataacgggtgccgtccaccaaaacgtcctcgtggataattattgtatgatcaaaaaaaataataattcctagtgaggagggaaatagatgcaaaagtttgaaaaagcaaattttaatatagctaattatgatgaaacagataattatggtaaatttgttattgaacctttagaaagaggtttcggtacaactttggggaattcacttcgtcgagttcttctatcttctttacctggatctgctgtatatgcaattaaagttcaaggtgctatccatgaattttctgcagtagatggtgttgtcgaagatgttacatcaattatcttaaatcttaagaaattagtctttgatgtggatagtgatgaatcggctacaatgattattgatgttgaaggacctgctactgtaacaggtgctgacattcaatgcccttcagaagtaacaatgatttctaatgatatggaaattgctcatgttgctcaaggtgctcacttatacatggaattatatgctaaaaaagatcgtggttatgtaagtgctgatcaaaataagaaggaaattaatactattggtattattcctactgattcaatttattcaccagttgaaaaagtatcttatgcagttgaaccaactcgtgttggggaaagtgccaaatatgatcaattaactttagaaatcgaaacaaatggagctttaaaaccttatgaagctatttcattagctgctaagattttagtagaacatttaaatatgtttgtagagttaactgatatggctgtgaatatggaagttatgtctgaagctcaaagtgatacaactaataaagtattagatatgacgattgaagaattagatttatcagtacgttcatacaactgtttaaaaagagcaggtatccaaactgttcaagatcttgccgctaaatctgaagatgatatgatcaaagtaaaaaacttaggtaagaaatcgttaaaagaagtaaaagaaaaattagttgaattagggttagggtttaaacctatcgattaattcgcgagtacgaaggaaggagcgctaatctcatggctaaaaatagaaaattaggacgtacttctgatattagaaaatcaatgttacgttctcttgcaacagaagtaattatgtacggtaaattagaaactacagaaactagagctaaagaagttcgttctgttgttgaagaattaattactttaggtaaacgcggtgacttacacgctagacgtcaagctgctgctgtattacacaatgtagttgatgctgaaactggaaaaactgcagtacaaaaattatttgatgatgttgcacctaaatatagtgatgtaaatggtggatacactcgtatcttaaagacttacaaccgtaaaggtgacaatgccccaatggcaatcatcgctttagtttaattgttaaagaccctcgggtcttttttcttttactttgcttgactaagtcaagtaataataatagaatgtttaggagtagttaaacgggtggtgaaaaagatggataaaatcattgaaataaaagatttatcatttgaatatgaagctggtctaaagacgatcaatcatatttcttttgatataaataaaggagattatgttgctattttaggacataatggtagcggaaaaagtacgattgcaaagttactaattggactactagaaaaaaagagcggttcaattattattaatggatacgaacttaatttggaaaatttatataaagtcagagataatataggaattgtttttcaaaatcctgataatcagttcattggggcaacagttcgtgatgatatagcctttggtttagagaacacatgtgtaccacaaagtgatatggataaaatcattactacttatgcagctaaagtaggtatgagtgattttcttgatcatgagccaactaaattatctggggggcaaaagcagcgagtggcaattgctggtattttagcaatggctccaacaatcattattttggatgaagcaacaagcatgttagatccaatgggacggcgtgaaattaatagtctagttaaggaattaaataaagaaaaagatattacgattatttctataactcacgatattgaagaagctaaaaatgctgatcaggtaattatgttgagtgctggtgaagttgttgcaagtggtaatcctaaggatatcctaagtgatgaagccaatttggtcaaatatgaattagatatcccatttgctttaaaagtagctaagggtttagaaaaattaaacattaggactagcatgtctttacaagaggaggtattaattacagaattatgtcaattacatttaaagaagtagaacatatttatagtgaaaataccccttttgcttaccatgctttaaaaggagtaaatttaaaaattactgatcaaagctttacagcgattattgggcagaccggtagcggaaagagtactttgattcaacatatcaatgctttgttactacctacaagcgggagtatcaatattgatgaatatctaattacagcaaccgacaaaccaagtaaattaaaaccacttcgtaaaaaagcaggactagtttttcagtttcctgaatatcaattatttgaagaaacaatcgaaaaggatattatttttggacctatgaattttggagtcagtgaagaagaggctaaaaaaattgctcataacgttctcaaaacggtaggattagacgaaagctatttaaataaatcgccttttgatttgtcaggtggtcaaaaacgccgagtagcaattgctggaattttggcaatgaatccggatattttaattttggacgaaccaactgctggattagatccgcaagggactaatgaaatgatgagtttatttaaacgaataaatgaaagtggtaaaactattattttagtaactcatgatatgaatcatgttttacaatattgtgatgaagtagtagtaatgaatcacgggaaagttgaaaaacatgatacagtcactaatgtttttaaggatagtgagtatttaaatagcttggggatcgatttaccaatcattactaattttatcataaaactaaataatcaaggatttaatcttgattcttcaattaataatattgaacagctcattgcagcgattggcggtgaattaaatggataatatgacatttggtaaatatattcctgttaattctttaatccatcaattagatccccgattaaaaataggagctctactaatctttttaattgctattttctttgatgcagggtttattggatatggtatcatgggagtatttgttttgttagttgcaggattatcaaatatttctattaaacatattttaaaagcaattaaaccgatggtttttatgatgctcttcttaatgatttttaatatttttttaatcaatacaggaagtgtattattcacaattggatcacttaagatttattcgggggcattgattcaatcagcgtatatttttattcgcttaattttaattattactttgacaactatcttaacatcttcaactaaaccgctcgatttaacactagcaattgaaaatctattgaatccgtttaagcgttttggttttcctgctcatgaattggcgatgatgatatcaattgctttacgttttattccagatttattagatgaagctaagcgtatcatgaaagctcaagcaagccgcggtgttgactttaatgaaggtagtatttcggaaaaaattaaagcgattgtttctctaattattcccttatttatctctgcttttcaacgagctgaggatcttgccaatgcaatggaaagtcgtaattataatcctgaagcatcgcgtactcgttataaatcattaaactggcagaccagtgatacaatggcctttgcacttacaatagttgtttccggtactgtgattataatgagctttgttttgtaatggttagggttaaatgtagtgtaagctatgacggaagtaaatttcatggctttcaagtgcaaaataaattacgaacagtacagggcgagatccaaaaggcattaaaaaatatatgcaaagaagagattattattcatggttcaggaagaaccgatgcaaaggttcatggaactaaacaagtttttcattttgatactacaagagaaatgcctgaagcgcagtggaaacgggcaattaatcattttttaccaaatgatatatatatcttagattcatactttgttgatgagaattttcatagtcgttatagtgcaataaaaaaagaatatcattatttattaagtacaaaagaatatagtccatttgaaacgaattatatttttcaatatggacgaccattagatttagaattgatgagagaagcagctaaaatatttattggtgagcatgattttgcatcattttgtagctatgatcagtatggtaatacaattagagaactatatgagttgtcgattactaatgaaaaggggattattaaatttattttagttggaaatggatttagacgttatatggttcggcatatcgttggtggactaattcaagttggggcaaaacgggttactaaagaacgattacaagagttattagatagcaaaggtgaacagaagtgtttgtttaaggctaagccccagggactatacttacatgaggtgttttatgatgaaaactaattttcatacacatacattccgctgcggtcatgcggttggcaatgaagaagcaatggttaaatcagcaattgaagaaggtattgaagttttaggctttagtgagcatgttcctttaccacgttatcgtaaacatatctttaaaggaatgcgttatactcttaatcattttcgttcgtttgcggttgcttgtaaagcaatcattactaatggtcctgcaatgcgaatgccatataaagataagcagttacatcttgaagaagtaaagcggttaaaggaaaaatattgtgatcaaattgcaatatatcaaggttttgaagctgagtattttgaagaatatttagattattatcaaggattattaaattcaggagaagcagattatttgattttaggaaatcactttaataagtacactgttcatactcgttattatggtaagatggatattagtgatgaagaaataattagttataaaaacgatttgttgaaagcattagatactaatttattttcttatgtagctcatcctgacttatttatggttggaaaagtatatttcgacgagttatgtgaaaatattacccgggaaatatgtcaaaaagcattagaaaaagacgttcctttagaagttaatgctggtgggattcgccgtggctatcgtaaagtcggggacgaaatccaatatccatatcccaatagtcacttttttgatattgttggagaggtagggtgtaaagtgattcttggaattgatgcgcatagtcctgatgatttcaatcaggatgattttgaagctttggagaagtttgcatggcgtcacaaattaaatgtaattaatatacctgaatttaaaaaaggtaaataaggatggaatctaagagcgttgggttccatcttttatcacgaataattaataaaggagcgacaatattttagggtattatagctaatgatttacaagcataaataagatattatatgctgttgtttaagtatataatggtagtattgaaatttttttgtaagatcaaaagaagatcaagaagttttaatctggataaagattattgaagtgaatcatacttttttatggtcaatcaactgatggagtgggagaactagttactgcagttaagacaggtgaggatattgattatcaaaattatcttttattaacaatacttggtttacaagatgtatcggttattatgaaaaaacatagctaatatttaataagtacttaattgtaataattgggtacttattttttcgtattggtttaattattggtacataagtggtaaaatgttacataggaactaggaggtgaagtcatggcacgtgagtgtatacacaaatatttagaagagcataagagtaattatcaaggtaagtaccgctgtcatagttgtgttcaaacaaaaaaatttgaacataagttccattattatattcgtgatacgcaatttagagaaatcaatgtctttgtaactttagattatgcgggaccagaagtgaagacagtattttcagttgatcttcatgaacaggaagaggaatatattactaaggatgctttaaagcaaataatttatttcaataaatatcgaacaattttacattgtcatgtttttcaacattatataaatagtaaaaatacagagaatatgttagaaccattagattatcgtaatattttagattatttagaatatcatcgtggaactaatcaagagacaattgatgagttttatgatttctttatgccttatttaaaaaggttgatacgaaatggtaattataaacgatttatggattcattgaatcttttattagataaaattatttatgagtatgaatgggatggtacgacggctaaatatttagatacccaatatcaatatcatttatattattttagaatcattattaggatggtttttgatgacttggatattttctatgatcaagttaaggaaccattattagaagcaatttggcgtttatgtaattcacagcgttttgcttttgcaatcatgacagattttggtaatttggttttatcccattatcgggttactaaagcaatctttaattatgttgatgctcgttttcaaaaggagggtgacagtaacatcgtcattccatatttaaaagcaatttttgaaagtgatgctgatggttatcgtaatgctgctatggatgttattcgttttgtgatgaatgatatgctgacttttgcaaatcatgatttacaattagctatcggaaattcaatcgtacaaaacgaaggatatgatttattgattaatttattttcaaaagattataatacatttgtttttgtttgcttcccgatttctactttcccaccagagtatcgtgaaccaattcgtgaagagttagaaaaagccattcgtttctatgcaggaagaatggaacatgacgagtaccgtctaagctcttttgaacaagttagtaacatcaatcgattattaatggaaaattataaggagtatggtaaaaatggataaaaaaggaaaaaaagtagttacctcattagcagttttagctgggttagcatccggggctggagctttaaatgcctttgctaataaaaccgttaaagcaatgttataccgccatcataaagaagatgataaaccaagtattttagaaacaaaatatgatgcgcaaagcatttatataaaaaatcaccaaggtattagattaagaggtgtccttattgaagcagttgatgcgaaaaaaactttagtaatcttgcatccatttgctctggaggctaaagatatgactttatatgtaccgttttttaaagaacgataccctgattggaatatcttattagttgatgcttgtgcccatggtcaaagtgatggatatatccgtggactaggtattaaagatgtaaaagatcttgtttgctggaacgaatatttgttaaaaacatacggaaaagagcatgaaataattttatatggtaaagaagctggtgctaatactattttaaaagcagctagtaaacatttattaaaaaatgttaaagctattattagtgatggagcctatacaagtgtgtatgatattttaggctatcgaatgattaaggattataaagtaccaaaatttccaacaatgcgtttaattaagcgtaagattaaacaggaaattaaagttaatattaaagaagattatgctgaaatggtcaaacataatgatattccaacattatatatccacatgaaagaagatgattttgtaccattaagtatggtctatccattatataatgcgaaccgtggtagcaaagtattatttgttttaaaagatgaacgttatttatatgaattagaagaaaccgatgaatttagaaagacattagcgaatttcattactaagtatgtaaattaggctggtggtatttgtggacaataaattaaaaattggcttgctggtagatgatagcgataatatctttactactgaaatttggcggggagcgagttatgcagccggaaaattggatgttaatttagttgtattttttggtggatttgtaggaagctcaaacatctacgggaattcaaggtatgagtttcaaaaaaatacaacttataaattttccaagacaaaagatttagatttattaattataagtgtctcaagtatcgttcatgggaataatcgtttaaaagaattattcgtaaaagaatttgaaggtgtgccaattgttactttaaaccataaatttggaaataattcactagtaacatttgataatgctaaagggatagaggatgcagtaactagtttaattcaagaacagcaatgtcgtaaaattgggatgattgctggtccttatgaaaataaagggtcggatgagcgattagctgcatataaaaaaacattaaaaagtcacggaatcgtcattgacgaaaaaagaattattcatacagcaacatttgaacgtggttatcctgaatatgccaagaaattattggatttgaatcctgatttggatgctattgtttgtgcaagtgataatcttgcctttgatgcgtatcaagttttaaaagaacgagggattcgaattggtgaagatgttcaagtagttggttttgatgatgttcaagaagcatcaaaagtaaacccgcctctagcaactatccgtgccgaagcagcacagttaggattttatgctgtcatggatggggttttatcattgcgaggagaaattccagctgaattcacaacacttgtcgatgtagattttattaaacgagattcggctgctaaagtgggttatttagaagaacgattatatcgtcaaatagttaattatacaaagagcgacaaagataaaatcgttaatattttaatggagtatatttttaataataaccacagtatttttattattgaagcccgcaaacgcgtaattgatttagttacttttctagttgaacttcataatgatgacttattcgaagaaaaaacatatacaaaattttcaaatttaattcaagaattaatagatttagatagtgttgagtttattgatttaaaaagaattttaaaagttattgatgtggttagtcagcgtcttagtgattatcgtaataatctatcaattattcatttcaatcaaaaaatcctacaaattattggcatgcattataatactattttaagtgaaagaacaaggatttcttgtgaagagaaacggctggttaatattttatcaagaggaatgctcagtgttcgaaacgagtatgataactacaatactatttttgaatgtttaaagcagctgaatattggtaatgcaagattatatttgtatgaaaaaccaattactagttatatgacacaatttacagttttacccaatgaggttattttgaaaggaagtataattaatggtaagattattattcctgatgataaaattccggttaaaaccgatcgaatattttcagaaaagagattgtttagtaattgtaatgaatatgttgttaactcagtttattctggaacaacacagtatggaatatttgtttgtgatttgaaatatcgtgattttgtagatttagattttgtttctagtcaattaggaacagttgtaaatacgatcaatttagttgagaagttagataatttatcaaaacatgatgagctgacggggctatggaatcgccgaggttttattgataaagtacaaggatatatgaatattaataaaggtgcattgatttttgtggatcttgatggtttaaaaattatcaatgatacttatggtcatgaaggtggtgatgaagcaattatcacgggagctaagattcttaaagatgcttttgatgaatttggtgtaattgggcgtattggcggtgatgaatttgcagtatttttaccaaatcaaagtgattttgctctttcagaaattgatcaattaataaatgataaaacaatctatcataacactttaataaaacgtaattttaaagtagaattatcttatggaattagtctttttgatcaatatcaagatttaacagttcgtgaactcttagataaagcagatcgggagatgtattgccataagcgtaataaaaaaggaaataggaggaaaaaagatgtattttaaagacagtaaaggctttccaagtgactttctttggggcagtgcgtcggcagcctatcaagtagaaggcgcttgggatagtgatggtaagggagtttccaactgggataaatttgtacgtatccctgggaaaactttcaaaggaacaacaggtgataaagctgtagaccattataatcgttataaagaagatgttgctttaatggcagaaatgggtctaaaaacttatcgtttttcaattgcctggacaagaatttatccaaatggaaacggtgaggttaatgaagctggtttacaattctatgataatttaattaatgaatgtttaaaatatggaattgagccaatggttacggtatatcactgggatatgcctcaagctttagaggagcaatatcatggttgggaaaatcgtcaaattgttgatgattatgtaaactatgcaactactttatttaaacgatatggtgatcgtgttaaatactggatcaccatgaatgaacagaatatctttactagctttggctggttagaaggaatgcatcccccagggaaagtagatgatatgaaaatgttctatcaagttaatcatcatgcaaatatggcacatgctaaaagtgtaattgcattaaaagaattatggccagaagcgaaagttggagcaagttttgcttatagtccatcttatgcaattgacaataaaccagaaaatgcaatggctaaagcagattatgatgatttgaagaattattattggatggatgtttatgcttatgggcgttatcctcgcgctgctcttgcttatttagaggctaatggtgttgcccctgtttttgaagaaggtgacaatgctatcatgaaagaagctgcacaattagttgatttcatgggagttaactactatcaaacaactacagttgaatttaatgatatcgatggtgttggaacaagtcatgaaatgaatacgactggtaaaaaaggtactgctaaagttcaaggtgtaccaggactttataaaaatcctcaaaatgctaatcttccaacaactgattgggattggacaattgatccaatgggaattagaatgtgttgtcgtgaaattacatcacgctatgatttaccaattgttattagtgaaaatggtttaggagcttttgataagttagaagatggggaagtacatgacccatatcgaattgcttatttaaaagcacatattgaggaattgaagaaggcttgtgatgatggatgccgtgttcttgcttattgtacatggtcatatacagatttattaagctggttaaatggatatcaaaagcgttatggttttgtttacgttgatcgtgaagaagatgaaaatagcggtactttaaatcgttataagaaagattcatactattggtataaaaaagtaattgaaactaatggtgaagaattataaggaaacagggttaatcctgtttttctttttcaataaattgtgtataatgagtgagagagaagagggatgaacatgagacgtaaagaaaatactgaagttgatatcttgtataatttattgacatatattaatgcttcatacagccaagatatgtattatacgatctgttatcaagtattaaataatattgaaaagattccagatatctcaatcaatgagttagcggacttatgttatacttcgcctgcaaccatttcccgtttttgcaaagctttaaaatgtgataattttgctgaatttaaaaaggaagtacaagtaggattaaaacaggcaagtcatgagattaaactccatcctgatgatttagtagagattcatcaaaatcctgtacactgtgttgatatggtctatgatctaacaattaattcattaattgagagtaagaaacatattaatattcatgagattgatcgcctatgtgatattatttatgatgcgaaaaagttacatttttttggtttccaatttaataagattttagcctcagatattcaatttaaattagttaagctaggtaaattttcatacgcctttgctgatcgtggtgacgatagtcaaagaattgaacttttagatgaggatagtgtggctattgtactttcagttcgagcgcgattatcaccggttggggatttaatcaaatcaattaaaaatcgtgaagctaaagtaattttagttactttaaatgctgaaagtgaagtaattgaattagctgataaaacttttgttgttcatggtaaagaaagtgattttacagagtcatcaatttctggaacgacagtgatgaaaacgttttttgatgtattgtatgtaagatatggattattatatccaagaagataagggggcaggttatgtatagttttactaatgattatagtgaaggtgctcatccaaaaataatgaaagccttaattgaaacaaatgatgagcaatgtgctggttatggattagataaatattgtctagaggctacaagattgttaaaaagacaacttcaaaatgataatgttgatatacactatttagttggtggaacacaaactaatgcggtatttatttcatcagtattgcgtccatatcaggcagtgattgcagcagatagcgggcatattaacgttcatgaaaccggagcaattgaagctacgggacataaagttttaactagacctcaccaagatggtaaattaacagtagcgatgattgaaagtattatcgaagagcattcggatgaacatatggtgcaaccaaaaatggtatatatttcacaatcaacagaatatggttctgtttatagtcttgatgaattaaaggatatagctactttatgtaagaaaaaagaattgtatttatttgttgatggagctcgattaggtagtgccttggcgctacccgatacacctacatttaaagatttagcggattacagcgatgctttctatattggaggaacaaaaatgggagcattattcggtgaatgtctagtaattgttaatgatagtctgaaagcggattttagatataatatgaaacaaaagggggcgatgatggctaaaggtcgacttttaggaatccaatttaaagaactttttagtaatgatctatatttagaaattggaaaatatgaaaataagatggctgatattttacgagctggtctaaaagattttgaaatgatggtaccttcacaaactaatcaagtatttccgataatggatgatgagttgattgctaaattacaacaagattttagctttaatatcatggatcgcattgatgatcaccgccattgtatccgtcttgttacttcgtgggcaacccctaaagaagctgttaattcgttcgttagtaaattaagcgaactactacataataacttgtaataaatattaataagtaatataatattcgtaggattattcctatactatatagaatggagaaattaaaatgaacaaaactgaattagtagaagcaattgcttcaagtacagaaatgacaaaaactgatgttgataaagtagtaactgcatttgtagacgtagttactgaagctctggtaaaaggagataaagtatctcttaaaggatttggtaactttgaagtacgtgaaagaggagaaagaactggacgtaacccaagaactggtgaaacaatgacaattgctgcaagcaaagctcctgcattcaaatctagtagtgcattaaaaaatgccgtaaataaataatataatataaaaatgaccttcgggtcatttttaattgggtatgaacgtcaaaatcatcttaaagtagcaggggtaagaactcatttgattgtctgtttagcggctgctatgataatgattgtttctaaatacggttttaatgatattttaagccacgaaggaatagcacctgacccatcacggagtgcagcacaaattatttctggagtaagttttttaggagctggtataatttttgtgcataaacgagaaataaccggttttacagcagcagaaatttgggcagctgcggcagtagaaatggcaattgtggcgggaatgtatgtgattggaatcttagccactattttaattttgttagttcaaattatttttcacaaacaatatcgttggattcccacagtatgggagagctggttaatttagggtaaaggataaatctgatgtaatttccaaaattcaaaaaattatgcatgagtatcatattgagataatgaattttaaagttagtcataatcaaagtaccataatactagaattattagtcaagttgccgaccagtttccccctagaagatatgttgactttatttgataaaaataatgatattatttcaatcgagataaaataaaaagcctattataatttaggctttttctataatgaaaatatataataataaagttaaatatgtgatattattaaatggtaatattggaggaaggtactaatatgtataaatatgaaaaggttgaacatgataatgagctgccgactaaattacatgatttttatatcgaagataatattggagaaccaattgaaaagcattggcatcgaagtattgaaattctgataccattatatggttcatttattttatggataaatggtaataaagttaaaataacagctggaaatatttatattattaattctcaagatattcatgcaattcaggctatcgagggtgagcgtatatataagggctacgccctacaaataaaatatgattatttgagggaatcgtatcatgatatagataaaatttattttcaacagcctaatcaacaaatcaataaattacttatggctaaaataattgatattattaatttttatgaaagtgacgatccgtataataacattcgagttaaaagtcatattcagatgcttgttttcttattattagataatcttagtaaaaaaagaatcgggtatctagaggttaaagatagtaaatataaagatcgaattacaaagattattaagtatttagagaataattatcaagaagatctctcagttaaaatgattgctgatgaattcggattatcagaaggatatctatctaagttatttaaagaaagcttaggggcaacagtgaaagaatatttgagtcgtgttcgattatggcatgcggaagaacaattagtggaaacagactatccggttattgatattgctattggcaatggctttcctaacgtgaaatcattcaatcaagcttttaaaagaaaaaatgtgataactcccgcaaagtatcgtgaaaagatgagaaaatgacattcattagataataaaacgccattaatgtaagcgcttaaaattatataatatatatattgaaaaaggaggagaaaggatgtttaagaaaattttaagttgcttaatgagtgctatgatggtactgggtttaacaatactgccaacccatgccctagagggaacagcaacaggaactcaaaaagcttttgtcgtaggtgatgattggggtgctggtgtcactaaatccattatcacttttgacaaaaaaatcaaagcagattctatcagtaaaacagattttttagttaaagaaactgccacaaacaaagtaagtgatagaacaattttagatgcttatgcttctgatgctcagggaaataaagtaactactgattcaaatattgttacagtagaaatgtatatttctccaagtgaaggtaatccaatttcttggaataatctaacttggaaaaatgcatgggctgacccatatcagttagaagttactttggcagctggtgaaactctagtttctgaaaatgaaacaattacaacaattgatgtagatccaactattaacgtagctgaagatggtaaaatttgtcctcaattagatggttttaaaatgagtgaatttaccaatgatggtactactgtttcatatgctttatatacaccagaaaatgatagccataaaaatgctttagttatttggaatcatggtgttggtgaaactggaacagatgttcaaatcgatttattaggaaatgaagttacggctttggctggtgatgaattccaaaatacaatggatggagcatatgttttagtgccacaaagaagatcatatgatagtacatctaatgctgaagctatttatcagttgattttaaaaacacttagagaaaatcctgatattgatcaagatagaattattataggtggatgttctgcaggtggagcaatgacaatgaccatgattattgcgcatccagaattatatgcggcagcatatccaatttgtcctgctactcaaagtgcgaatgtgtctgatgaaacaattgaatcacttaaagatttaccaatttggtttactcatgcaaaaaatgattcaactgttgccatcgctactacaacagaacctcttgtagaaagattacgggcagcaggtgctgaagtacatacatcaatttttgatgatgtgcatgatacaactggaagattctctaatgaagatggaacaccatatcaatatgatggacattggtcatggacttattttgataataatgaatgttatgatgaaaatggtgttaacttatggcaatggatgtcagtacaaactaaagctgataaagtaattgcaagtggttctcaaaaggcctatattattggtgatgattgggggcctgcagtaacaaaaacagtaattagtttagataaagcaattgatgctgattctgtagttgctgaaaactttaaagttgttgaagaaaaagaagcaacaattaattggggaactggtgaaattggtattgcaactgcagatcgtaatgtaactgcagcttatacttctgatgcccaaggaaataaagtaaccggttcatctaaatatattacaattgaaatgtatgtttctccaagtgaaggatcaccatttatttataatttaaaaacaggatttaactcatggtgtacaccttataaattaaatgtaagtttagcaaaaggtgctacaatgagttcaggtgatgaagtagtaaccgatttaaatattaaagcagatattgacgttgcaggagatggaaagatttgtccacaaggtgaagtttttgaaatgaaggcttatactgctaaagatggtacaacgtattcatatgctgattatacaccagccaaagatgataagaaaaatgctcttgttatctggttacatggtgcaggtgaaggtggaacggatccatacattgatattttaggaaatgaagtaacatctttagtatctaaagaattccaaagcttatttgaaggtgcctatgtactagcaccacaaagtccaactatgtggatggatgatggaacgggtgcttatcaaaatggtgataaaggttcaatgtatgctgagagtttatttgaaatgattgatgcgtatgtaaaagctaatgacgatattgatccaaatcgtgttattattggaggatgttctaatggtgggtatatgactatggaaatggttttaaaacatccaacatattttgcagcggctttcccaatctgcgaagcattccaagatcaatatattacagatgatcaaattaatgcaattaaggatatgccaatttggttcacatatgctaaaaatgatggtacagttgatccgactttatgtgtagaaccaacagtagcaagattattagctgctggggctaataatattcatgtatcagtatttgatgatgtgcatgatacaactggaagattctttaatgaagatggtacaccatatcaatataatggtcactggtcatggatctattttgataataatgaatgttatgatgaaaatggtgtaaatgcgtggcaatggttagctaaacaaattaaaactgctgctccagtagaaaccccagatcaaccaacaactccagatcaaccagcgaattcagtgaaaactggtgatgatgttaattttgcaggattaggagctattatgatgctaactcttgcaggaatttatgtatctcgacgtaaatataattaaattaaaagagctagatttgaatttctagctctctttttttgtttctaaaaatttaactttgatctcatagttgccatcaattcccggaattgcatttaaatattttttaattgtactttgtgttttagttgctgcttcgcttaataaaccattttcgattgcttcttcagctactgcttctttttgttttttagcaaaggtagtataatcattgacagaaattgggttgaatacattttttgtttcatcatatacttcaatactactctcgtcaatttcattacttaaaatttcaatttctggtattgaaacggtaattatattattattaatagctacttcaattttatccattttgacaccagctttaagtttaccgtcatatgtaattaaaaaacttttttgagttaaaggaatatcccagccattaaatgttaaattattagaaaatttaccaactttagtataattataggacattgttgccaattcttcgatttcttggagctgttgactcagaccagttgacgatatctttggttcactgctgcttgcaaatcgagttcccgcgtaaaaaatcagtaatgcaactagtaggattgcaatgattccaccaatagctttttttgtttttcctaatgtgtctaatattttcatttttatcacctagggacattataacataattcgacaattattgagaaaataaaaaagcccaaaggctttattatttaatgattgttccgtatacttcacgaccacatccagccgcatttgattcatctgtgtcaatatgcatagctgtagcataattttcactaacacgacaaacaacatcaccgaaaattaatgaacgtccttcagtttcgatttcaactttaacgatttgtttatcagtaactccaaattcaaccgcatcagcaggagtcatatggatatgtcttttagcagcgataacgccacaagaaatttcaacttcaccagctggtcctactagtttgcatcctgcagttccttcgatatctccagattctctgatagcagcctgtaatcccaaagcacgagcatcagttaatgataactcaacttgagtagctttacgagttggtcctaaaacagacattttttgttcacccttagctccaattacagtaactttttcttcacatgcaaattgtccaggttgagaaagatttttcttattagttaattgatacccttttccaaataatgtttctaagtcagcgtcagataaatgaatgtgtcttgctgaagtttcaacgataatttttttagtcatagtcattctcctttttccttattctatattactccttttatcgctattttcaaggaaatagcgataaaatagaaaaaattttaaatttttttaaaaagattttagatagaaatttattaaaatagtaaaaataaattattataaatgctaaaaaataatcattttagtactaaaatggctgttttacggggttaaactaggaattatttttgtttttttaggatttttctaaaaaattcacatatctttacacatttatcgaaatagtgtattatggggctacataaaaagggggaacctatatgaacgagaaaaaaaatctaggattatacgataaatcatttgaacatgacaactgtgggattggtgcagttgtaaacattaagggagttaaaacgcatattacggtaagtaatgcattaaaaattgttgaacaattagagcatcgtgctggtaaggatgctgcaggtgagacgggtgatggtgtcggaattttaacgcaagtaccatatagttattttaaaaagacaattaaagaatttccattaccgttagaaggtaaatttggtgttggaatgttatttatgccaagagatgaacatttacgtaatcgagttaaaaaaatgcttgaaacaatcgtaattaaggaaggaatggaatttttaggatggcgtgaagtacctactgttcctaaagtattagggcaaaaagcacttgatgcgatgccttcaatttggcaatgtttcataaaaaaacctcatggaatcaataaagggatcgagtttgatcgaatcctttatcaaactcgtagaatttttgaacaaagcaattttgacgatacctacgtatgttctttttcatcacgaacaattgtttataaaggaatgttcttggttggacaattgcgctcattttttaaagatcttcaagatgatgaatataagagcgcgattgcgttagtccattcacgtttttcaactaatacaatgccttcttggcaacgggctcatcctaatcgttttattgttcataatggggaaattaacacaattaaaggcaatgctaataatatgttatgtcgcgaagaaatcatgacaactaatttgctggatactaataaagtgtacccagtcgttgatattaacggttcagattcagcaatgctggacaatacattagaatttctagttatgtctggaatggaattaccaagagcagtaatgatgtgtattccagaaccttatgataatgataaaagtatgtcacagtcaaagaaagatttttatgaatacaattcaactctaatggaaccttgggatggtccagcttcaattttattcagtgatggagaagttatgggagcggtacttgatcgaaatggacttcgcccatctcgttattatattactcgtgatgattatttgattttatcatctgaagttggagctttagatattcctgctgaagatattgttattaaagatcggctacgcccaggaaaaatgttattagttgatacaaaagctggtaagttaattgcggatgatgatttaaaagaaagttatgcccataaacagccttatggtgaatggcttgaaagtaatttgattaaattaaaagacatgcgcattcctaatgctcgagttgaacgttatcaaggggaacagctaactaagttacagaaaatttatggttatagttatgaggatgtaaatacgtatataaaaaaattagcattgaatggtagtgaagaagtagttgcaatgggaaatgattcaccattagcggtattatcaatgcagcatcccccattatttaattattttaaacaattatttgctcaagtgactaaccctccaatcgatgctattagggaagaaattattacttcaacagctttatgtattggaacagaaggaaatattttagctgataatgagaagaactgtcgcttgttgaaaatcgatcatccaattttaagtaatactgatttattgaaaatcaagaatattaagaaagatggttttaaagtagcagtattatcaatgctttattataaaaatacttcacttgaaaaagccttagataaattatttgtagaagcagataaggcttatcacgaaggagctaatattttaattttatcggatcgaggagttgatgaaaatcatgttccaatcccttctttattagcagttgcagcaatgaatgaacacttagtaaatactaaaaaaagaatgtctgtagccttgattttagaatctggagagccacgtgaagtgcatcattatgcgactttgattggatacggggctagtgctgttaatggatatttagcacaagatacaatttttgaacttgttgatgaaggcttactagataaagattactatgctgcaatcgaagattataatgacggtattttgcatggaattgttaaaattgcatcaaaaatgggaatttcaacaattcaatcatatcggggttcacagaacttcgaagcaatcggtttagctaaagactttgttgctaagtatttccctaaaacagtaaccagaatagaagggaagacaatcaaggatattgaaaatgatgttgattatcgtcatagtaaagtttatgatccattaggattagacgtcgatattacacttgatagtcgtggtgatcataaagaacgtagtggaaaagaagaacatctatacaatcctgcaacaattcacaaattacaactagcgacacgcaatggcgattataaattatttaaagaatattcagcaatgattgatgaagagggtaaaaatctaaatcttcgaggattattacaattcaaaaagggaaaatcaattccgcttgatgaagttgaaagtgttgataaaattgtacaaagatttaaaacaggagcaatgtcatatggctcaatttcaaaagaagctcatgaaacgatggcaattgctatgaatcgtttgaaaggaaaatctaatagcggtgaaggtggtgaggatccagagcgttttattcttgatgaaaatggtgatagtagatgctcagcaatcaagcaggttgcttcaggaagatttggagtgacttctcagtatttatgttcagcaaaagaaattcaaattaagatggctcaaggagctaaacctggtgaaggtggtcagttaccagctggaaaagtctatccatgggtagctaaaacaagacatagtacgccgggagtaggattgatttctccacctccacatcatgatatatattcaattgaggatttggcacaattaatttatgatttaaaaaacgctaataaggatgctagaatctcagttaaattagtctcagaagctggtgtcggtactgtcgcagctggagttgctaaagctggggctggagtaatcttaatttctggatatgatggtggaactggagcagcacctagaaactctgtatataatgcaggattaccatgggaattagggttagcagaagctcatcaaacacttatcatgaatgatctgcgtggccgtgttgtattggagactgatggtaaattaatgacaggtcgtgatttagcaatcgcaactttattaggggctgaggaatacggctttgcaactgcaccgcttgtaacaatgggatgtgtaatgatgcgagtatgtaatctagatacttgtccagttggagtagcaacacaaaatccaatcttgcggaaaagatttacaggtaagccagaatatgttgaaaactttatgcgatttgtagctcaagaattacgcgaatatatggcggaactagggtttaaaacaatcgacgaaatggttgggcgcagtgatttattagaagttcgtccaggtgttgaaaatgtagatttatctagagtgattaataatccatatattaaagctaaagaaatacgtcataatcctaaaaataattatgattttaaattagaagaagtaaaagatacaacaattttgttaaaagagtttaaaaacgctttagaaaaccaccaatcacatgaaatcaatgttgatataacgaatatcgatcgaacattaggaacattatttggatcagaaattactaaacgctatcaagatacattagatgatgatacattcaaagtaaattgttatggttctggtggccaaagttttggtgcttttattcctaatggtttaacattgacattgcatggtgatagtaatgattattttggaaaaggattatcaggaggaaaattagtagttgttccacctgaaaattcaaactttaaagcagctgaaaatattattattggaaatgttgctttgtatggagctacttcaggtgaggcatatattaatgggattgctggtgaacgttttgcagttagaaattcaggagctaaagctgttgtagaaggtgtcggagaccatggattagaatatatgacaggtggtttagttgttgttcttggagaaactggaagaaattttgcagccggtatgtctggtggaatcgcatatgtatacgatcctaataatcgtttgtattcacgaattaataaagaattagtctcttattcatctgtgacaagtaaatatgatgaagaagaattaagggccgttattcaaaagcattataatcacactaattcagaagtagctaaagatattttagataattttggtgaacaagtatcaatgtttaagaaggttgttcctcacgattataagcatatgattgaattaataaagtattatgaaaagcaaggtctaacaaatgaacaagctaaagttgaagcattcaatgaagctaggaagggggtataaccatgggtaaaccaacaggatttttagaaattgagcgtcaagttagtaaggctgttgagccgaaaaagagaattcaaaattttaatgaatttcataagcatttgagtaaagatgatcaagcctgccaaggagcccgctgtatggattgtggtgtaccgttttgtcaatctggtcgggaattagaaggcgctgtatctggctgtccattaaataatctgatcccagaatggaacgatcttatttatcataataactataagcaggcattggcaagattattaaaaactaataattttcctgagtttactgctcgggtatgtcctgccttgtgtgaagcagcatgtacttgtggtttaaatggcgaacctgtaaccgttaaggaaaatgaatatgggattattgaagatgcttatgcaaaaggtttgattaaaccatgtccaccaactcatcgtattgataagaaaattgcaatcgtgggttctggaccagctgggttaactgcagccgatcaattaaataaacgtggataccaagttactgtctatgaacgggacgaccgtataggtggattattaatgtatggaattcctaatatgaaattagaaaaagaagttattgattgtcgtgttggaattatgaaggctgaaggtgttgtttttaaaactaattgtggaattgaagatgaaaagcaagctaaagaattattagataactatgatcgagtaatcctagcttgtggttcacggaagccccgtgatattgatgtaccgggacgtcaaggcaggggaattttaatggcagttgattacttgacagcaataacaaaatctttacttaatagtaatttaaaagataaaaattttgctccaactaaagataaacatgtactagttattggtggtggtgataccggtaatgattgtgttggtagtgcaattcgtttggggtgtaaaagtgtaacgcagttagaaatgatgccggaacttcctgctattagaagtgacaataatccatggccagaatggccgagaatcaaaaaaacagattatggtcaagaagaaagtattgctgttttcaatcaagatcctcgtatttatcaaacaacggtaaaagaatttattctagataaaaatggtcaggtaaaagaagcagtaattgtttcattagagccaaaagaaaataaagaaactaagcgagtagagatggtacctgttgctggcagtgaacaaactattcctgcagatttagttttaatatctgctggatttattggaactgaagatcatgtagctagagcatttaatgttacattgaatcctcgcggaaatgtaaaaagcaatcaggattatcaaacaaatataaaaaaattatttgttgcaggtgatatgcgtcgaggacaatctttagtggtttgggcaattaaagaaggtcgcgaagttgctcgagcagttgattttgatttgatgggttatagtaatttataaaaaagatcatagcgaataagcagttgtttatccgttatgacctttttattttttgttataaaactaatgatggagcattgtaaacacgggcagctagttcactatcaagtaagtataatgaacgagaatcagaaccaaatagattaaatttagtaattaaatcattagcattagtttcttcttcaccttgttctttaacaaaccaatctaagaattgcattgtacgaaaatctttaagagaataggcagcatcatagagattatgaattaaactagtaacatattcttcatgttctaagccataaattagaggatcatttaatttagtatactctttatcaggtttatcgattgcttcaagggttactttagcattgttattttgaagatattgaacaaataatattgcatggtctctttcttcttgtgcttggatattataccagttggcaaacccatctaatccgttatctttatagtaattagcaaagtctaaataaagatatgcggaataaaattctttgttaacttgatcatttaataattctacaacttttttatctaacattttaattacctcctgtatatagtatagacctattttatttaattgttaatagatttaacaattatgtaacattagacaatatcattgttattgctttgttcactactattgggaatactagtaggattattagttttactgtctaaatttttggtagcatttatacagataaaggagatcaagattgtaagtaagcagctacttaagccgtagatccatttcttatcattgttaataaaaacctgatgttgagatagtttagacataattaaataaatgatagctagactagcaattaatgcacaaataataatactacaagttgctaaaattgaaattcggtatttactgttttgattattggctgttgttggaaagatactgctatcactgtttccaaaaggatttgtactattattagttgatgaatcattgtttccaaaaggattatcaccatcgagattattactgttcgtagatagtgatgtaaccgctgaactatttgaattaaggttataatccaagataactgtactaataccgctaatcaaagcagtaatgatcattatcatgcaaattagattatttttcttttttaacataactttcacctcacagtaatagtgtaagaaaagatagtatagttaaaatgtttacaatatgtgaatatatggcaggtttgtaaatctttatgtcattattttgtcggattaaagaatcttaattatttgacaaagggtttttaatttaaaatggataatggtataatagttcatgaaagtgggtgatttgatgccgttaatttctgcatttacatttaatataagttcaatccttaatgtaggtagaactattatagatttaattcttgtgtggtatgtaatttatttattgatttctatgatgaagcaaaatatgcgtacaatgcaattatttaagggagttttattgatcctaattttaaaaatgtttacaagtttattaagactaagtgcaatggattatttagttgatacaattcttacttggggtgtggttgcaattattattgtatttcagccagagattcgaggtttgttggaaaaaatcggacgaactaaattagaattaaagcatgataatcttagcgatgatgaaaaagaacgattaatggatgagctggttggagcaattactaaattatctgaggatcaaactggggcattaataacctttgaacgaagacagtcgttaatagattatattaataccggaacaaagattaatgctgatattaaagcagagttatttacgacgattttttgggaaggaactcctcttcatgatggagcaacgatcattaaaggggatcgggttgtctgtgcggccgccttttatccacccaccaatcaggaattaagtccactatatggagctagacatcgtgcagccttaggtattagcgagataactgattcgcttacagttgtagtatctgaagaaacaggaacgatttcttttgccacagatggtaaacttcgaaaaattcctcgaaaagagttgcgagcaagtttggttaatgaactagattggttcaatactcaagaaaaggatggtgagtaagatgtcaaaaaaagaaaatcctaaaaatccaataaaaaaagattcaactactgatttctttttaaacttcattactcgtcagaaatcagaacagaaagatgaagaaaaaacaactacttctaaagtagttgatgatactgtaaaagtgagagataaagcatttgaattattctatcacatgatcaattctttaaatatatttttagatcgtatgttgcaatcaaatctttcaatgaaagttttatcgtttgttatggctgtcgttttactctttacaattaccggtggaattgataatatcttttcaacccctaatggcggggattatctgtatgatgtgaaaattgatactgaagggttacaaagtgactacgatgtagtaggattaccggaaacagtaaatgttgctttagtcggaccttctttagatatttactcaacaaagatatctaagaaatataaagtagttgctgatttctctactcttggggaaggtgaacatacaattgaattgcagggaaaagattttcctagtgatttgcaggtaatgatcgtaccacagactgttactgttaaaatcacacaaaaggttacaaagacttttgagctgggatacaaatttagtaatgaagatagcatggattctaaatattcagtatcagttgaatcaatggaacaccatgaagttgaagttcgaggttcacaagacaatattgataaaattaattctgttaaagcagtgattgatttaaaaggaaaaaataatgattttgaacaaaatgctaagatatacgcatatgatcgtagtggtaaaaaggttgatgtggaaattattccaaatacggtcaaggtagattgtatggtttcttcttatagtaaagaagtttccattgtccctcaatatacagggcaattagctagtggatatggttttgagagtattaaacttaaacaggaaaaagtaactatatatggtaaagaagaattgttgaatagtattaatagtgttggggttgtaattgatttatcgggattaagtggcgataaaagttattctaaattgccgcttactggtatagagaatattaataagttagattttaatactgttgatgcatctgtgcgagtatcaccatcaacaaaacgaataataactgatattccaatcaacattgttaataataatggtggatatcaagttaattttgctgaaggacaggacaaagcttcagtcgaagtagatggtgtggcagcaatcttagatgcactgacgatcaatgatttcaatatttcaattgatttggcaaacttgaaggcggggacgaatactgttaaagtagatttaaaaatagataaaggatatttaacggggaaattagtttctccagaaagaattacgattaccttaagaaaataggaggaaaaattaacgatgggtaagtattttggaacagatggatttagaggggaagcaaatgttgacttaacagttgaacatgcttataaagtagggcgctatcttggatggtactactctcaaaatggtaaagcaaaagttgtgattgggaaagacacaagaagaagttcatatatgtttgaatatgcactagtttcagggttaacagctagtggtgctgatgtttatttattacacgtaacaacaacaccttcagtatcatatgttgtaacaagtgaagagtttgattgtggaatcatgatttctgcttctcataatccttattatgataacggaatcaaaatcttagatggtaatggtcataaaatggatgctggagtagaaaatttaatcgagcagtacattgatggtttaattgatgaattaccatatgcaaccaaagatgaaattgggtgtgctttagattattcaatcggtcgtaatcgttatattggatatctgatgtcgattcccactagggcatttagaaattatcgtgtaggtttagactgtgccaacggtgctagtagtgcgattgctaaaagtgtttttgatgctctaggagctaagacttatgtaattaacagtgatcctgatgggttaaatatcaatactaattgtggttcaacccatattgaagtcttacaacagtacgtaaaggaaaacgcactagatattggttttgcttatgatggagatgctgatcgctgtatttgcgttgatgaatttggacgagttgtagatggggatctaattttatacgtttgtggtaaatatttaaaagatcacggagaacttgctaatgatactgttgttacaacaatcatgtcaaatcttggtttatataaagcatttgataaagaaggtattaaatatgaaaaaaccgctgttggcgataagtatgtaaatgaaaatatggttaaaaatggtcatgttttaggtggtgaacaatctggacatattattttctctaaacatgccactacaggtgatgggattttaacatctttaaaagtaatggaagctgttattgaaagtaaacgaactatcgcgcaattaattgaacctgttactatttatcctcaattaatgaaaaacgttcctgtaagagataaaaaagaagcacaggaagatcctgatgtaagagcggttattgctgaagttgaaactgatttaggtgagaatggtcgtgttttagttcgtgaaagtggaactgaaccggttgttagagtaatggttgaagcagatactgatgaaaaatgtcttattaatgtaaataaaattgttgataagatgaaggaaaaaggatttgtaatcaaaagataaaataacataatgtcacacaatattgccatataatatggcaatatttcatatatattaaaagtgaggtgaaatacatgcaatttagaataaatattattgatgatgaaaaaaatttaaatgatttagtaagaacctatttagaaaaagaaggatatattgtttattctttctatacatatgatgaagctttaatgcataaggatgatgatgttcatttatggttgattgatattatgttggatcgtgctagtggatttgaattatttaatgagattaaggctagtcgccctaaaatgccaattatttttatgtctgcacgagatcaggaatttgatcggattattggattagaaaaaggttctgatgattatataaccaaaccttttaatattaaagaagtgattttaagaattaataatttaattaaacgttcatatgatgatccatcaaaaattaagatggatggatatgatattgatttagaaaaacggcgcgtatttaatggtggagaagaagtaattctaacaacgaaagaatatgatttattagtttattttattactaataaaggcttagctatctctcgggaacaggttttgaataaagtatgggacgaaaactattatggtagcgaccgggtagttgatgatactttaagacgtttaagaaaaaaaatgccagagattaatgtacgcacgatctatggttttggctatcgtttagactaatgttaaataagttttctttgcagcgacagttaagcagattttctttacaaaagcagttaattattatcttttcattattagcgatgcttgttatattgattttagtaccgttgatcaataaaaatcttaatgctctaatagatgaagagatgtttaaaacgctagatacttcacagagcgcatatattgattttgattattcaccaattgctaaatcaagtgataaacaaatttatcatatgacttatgataaaaatactaactatttatttccaccatctaatctaactcgtgataaagttttagcgttatatccagtatttgctgataaacttaatgagatgctaaaaggaaataaagataagatccaggctaaagggacacttgatggcgatactctttattttcaaataactaaaaaagatagtgattcttatatcatttcattagtatacagtgattactctgctagtttgatttcatcaattaggcaacaaataataaatattttatatgtatcatttgctgttattggcgcaattatttttatttgggttagtggcttaattaaaccattaaaattaattagaaattatatagaagacatacgtaaagataaacaaagtgaattaaagattgatcgtggcgatgaaattggttttgtttcagatgaacttgttgcgatgaaagaagaaatagataaacaaagcaagatcaaagaagaaatgattcataatatttcccatgatttaaagacaccgattgctttaattaaatcatattcacaaagcgttaaagacgatatttatccatatggtgataaaaattcatcaatggatataattattgaaaatgcagaacgtttagacggtaaagttaaaagtttattatatttgaatagattagattttattagtggtgaaaattctgatagtgaagttgatatgcatgaattaattgaacatattgttatccaattacaaggaatgcatcctgaaattgaaattgaaacagatttagctttcgtttcatttaaaggtgatgaagaatgttggcgtatttgtgtggaaaatatagttgataatgcttaccgatatgttgataaaaaaataaaaattattttaaaaaatgattatttagaaatatataatgatggtgagccaatcgataatgataacattgaggctctattccaaccgtatgaaaaaggaacaaaaggtcaatttgggttaggtctatcaatcgtacataagacatgtactatgtatggatataatgtaacggcggttaatcaggaaactggagtaagctttattattgaaaagaaatataattaacaatccaaggctatgccttggattttatttacgttataataagtgataataagtgggtgattaaatgttagacaaaaaaattgagttctttatagcgactgttgaaacaggttctttttctggtgctgcaagaaagttaatactgtcacaatcggcagttagtcaacaaataaatttattagaagaagagttagctgttaaattatttgatcgctctaattatcgccctagattaactagagccggtgagttctattttaaaaaatgtcaggaacttgttgctatttatgaaaaaatgaatcatgaggttaaattgattgattcctatagtattcgtattgggataactggcccatttgaaaatcatcatattccttttttagttaaattatttaaagaaaagtacccacagatagaaataacaattataaaaggtagttttcaaagttgtaaagaatggttaaataataatcagattgatgttgcttttgctattgaaaatgattttattaatgaacctaaaattacctatgaagttttactgcagcatcaaatatgtgcaatttgcagttatgagcatccatgggctaagttaactaagatagcagcgcagaatcttatcaatcaaccgctaatttgtttatcaagaaagtttggggaaggcttttatcatgattttgtagaagcttttaataaagataagattgagcctaatattataaaggaagtagatactcttgatgagttgattttatcagttaagcttaatgaaggaattggtctaacttcacgtgaagttgttaatgaggaagaagtagcgattttagatattattaattcgcatcatcatgcaaactatgttattggttatgctagggatataaataatcaatttatttttgattttgttgcgctggcgaaaagatattttaataaaactctataagtaattcttataaagtttataagattatagctactattttttataattatctagctctataatattaatatatagatggaggaagataagatgtcaaaagtaatagtaacaggtgtagatggtaattttggaggctatgtagcgagaaatattactcagttaaaagaaaaagaagatttgatttttacttgtccatttgaagaaggactaaaggaatttaaagatactggcattgattgtcgagtagcaaattttaatcatccagatgaacagttagttgaagccttcaaaggtggcgatacaattttaataatttcagcaccatttgttggagcaaagcgtcaagcagcacataaaaatgcaattgatgcggcaattaaagcaggggtaaaaaaagttgtttatacatcattagtaaatgctcgtgatgtagaaaatcctagtattgaaaaaatcgatcatgcatggactgaagaatatatcgaaagtactgaattagattatattttccttagaaattcacaatatgctgaagcaatgataactagttatttaacatctaatggtaacttattgagttgtcaaggagatggaaagatggcatatatctcacgtttagattgtgcgatggcagcgatgtatgcactaacaaaagatgatatgcataagcaagttttaaatattaatggtcctgaattattgactttacatgaatttgcggcaattggaaatagagaaacaggaatggatgtaaaagttgtcgatgttagtgaagaggaggtatatgctggatttgatgctattggggtaccacgtactactgatggaacatttaaagatggctcaccagctccttattcaagtgatggaatggtaacttttgcaagagcgatccgaattggtaaaatggataattttactgatgattttgaaaaattaactggtgtaaaaccacgtacagtggcttatatgtttgccaataacagtgaatatggtgttggagcaagaaattctacagatgactaattattagcttattaattggtagtgatattattgagaaatcaataatattactatcaatttttatttgatagaatatgtcaaataaaataccaagattatttaagaatttatttaaagaaatagaattattttatgctatgataaaattatggaggcggaaaaatgaaattattatttaaacagcgctttttttcatggctagatagttatgatatttatgatgaaatgggaaatacagtatacactgtaaaaggtgaattaagctggggacataaattacagatatataatgctgatggtttacctgttggtacaatcaaagaagaagttttcacttttttacctaaatttgcgatgtaccttaatgatgaatatattggtcaaataaaaaaagaactaacattatttaaaccatcattcattttagattataatgattggaaaatttctggtaatttttgggaatgggattatgaaatcattgattctcgtggtattgttattggagatattaataaggaattatttaattttacggatacttattctctaaccattagtgatccacgaaatgcaatctatgttttaatgattgctttagctattgatgcgcaaaaatgttcaaataacagttaataagacacgagagtgtcttgtttcatcttatgaaaaataattactaaattaatgaagaggtttataataataaccgaaggtggtaaaaatggggaaagatgaaaacaattttgcgcgtggcagtattccacgacatattataaatttagctggtccaatgatagtggcacagttgatcaatgttttatataatgttattgatcgtatttatattggaagaattccagatgttgcgacattagctatgggaggactagggctatgtttgccactgatttctattattattgcttttgctaatctatttggtatgggcggtgctccactttgttcaattgctcgaggacgtggtgatattgaagaagctgaagaaataatgggtaattctttcatgctattaattatttttgggattgttttaacagttattggtttgatctttaaagaagatttgctgtggctctttggtgccagtgaacatacaatcggttacgctaatgattacatgactatctatttattagggacagtttttgtactgattggtttaggtatgaatagttttattaatagtcagggatttgctaaaatcggaatgatgactgttttgctgggagcaatagttaatattattttagatccaatttttatttttggactagattcaggggttaaaggagctgcttttgcaacagttatttcacaatttatttctgcattatggacattacgttttcttacagggaaaaaaacaatattaaagataaaaaaacagtatttgagtttaaaagtaaaatatgtcacaaagattatttccctaggaatggcagggtttatgatggcaatcactaattcgattgtaacaatcgtatgtaatgcgacattgcaacaatatggaggagatctttatattgcaattatgacgatcattaattcaattagagaagttgcttctttgccggggcaaggaatggcaaatgcttgtcaaccagtattaggatttaactatggtgctaaagagtatgcacgggttcttcaaggaattaaatttgtaactttaacggcactatcaatgatgctgatagtttggctggcaataacggtatttcctgaattatttattaagatatttagtcataatcaagaaatcattacccatggcgtgagtgctttacgtttgtatttctttggctttttcatgatgtcatttcagatgacaggacaagcagcagcagttggattaggaaagtcaaaacaagctgttttcttttcaatttttagaaaagtaattattgttgccccactaacagtgatcttgccaatctatattggcattgatggagtttttattgcagaagcaattagtaattttattggtggtggtgcctgttatattactatgtggtttacaattgcgaaaaaattaaaatcgggtattattagtgaataatagtaaaaggattataagtgttataaatcgctaatcaataatattagcgattttctttttaaattatgaaaaaataaatattgtcaaataaatgatgataaaatcatggtaatttggaggtactaaaatgaaattaaaagaaaattttttatggggtggcgctacagctgcgaatcaatatgagggtggctataatgaaggtggtcgtggattaagtattaatgatgttgaaaagggtgctaaacatggagtacctcgtgaaattcatgagtatattcatgaaaatacatattatccatcacatgtagctacagatttttatcatcattatcaagaagatattaaactatttgcccaaatgggtttcaaatgttttagaatgtcgatttcatggtcaagaattttcccacgtggtgatgaagaacaacctaatgaagaaggtttggctttttatgataaagtatttgatgagttattgaaatatggaattgagccagttgtaaccctatcacattatgaaacaccattgactttagttaatgaatatggttcatggagaagtcgtaaattagttgatttctttgagcattattgtaagaccgtattttctagatataaggataaggttaaatactggatgacttttaatgaaattaatggctgtttagaggtggctcgtccttggcatcaagcgggaatcgtttatcgtgatgatgaagatcattatcaaacaattctccaagctagtcatcatatgtttgtagcaagcgctaaagcagtgattgcagggcatgaaattaatccaaattttaagattggctgtatgttaatttatccaacaacatatgcagcaacttgtaacccggaagatcagattatgatgagaaataagatgctaaatactttctattatggtgatgttcatgttcgaggacgttatacaaatacatgtacttcattattgcataaacatggtgttgaaataaaaatggagcctggagacgaagaacttttagcgaaaggtaaagttgattatattggttttagttattatttttcagctgttgagggtaatgatgctgaagaaattgaaggaaatgttgttaaaggtggacgtaatccgtatttaaagatgacagattggggttggcaaattgatccattaggattaagaacagctttaaatgagttatatgatcgttatcaattacctttgtttattgtagaaaatggaatgggagcagtagatacagttgaagtcgatggttcaattaatgatgcttaccgtattgattatattaaagaacatatcaaagcatttaaagatgcagttgagattgatgaagttgatttaatgggatataccccttggggatgtattgacttagtggcagcaagtaccggtgagatgagaaaacgttatggttttatctatgttgataaggatgatgagggtaacggaacccttgcacgtaaaccaaagaaatcattctattggtatcaaaatgttataaaaacaaacggtgaggagctgtaatgacttaggtcgttacagttttttgtagaatgtgttaaaatattctacaaaggggagagttttatggaaaattattgtcgcaaaatggcctggctcttatataatagagggctagtcgataaagaaaatgttgaagatctgcgctttttgctcgaacttattttgacacaggttataacgatcatatcagtctatataattggtctattatttatggatgcactgagtatcttgattatttgtgcctgttttgtagccgggcgaaaatatctagatggttatcatgccgatacttttagaaattgttatttactgacgatgttaaactttattttttgtatttttatgagtaggatagtagcatatgttgaaatattttattttataggaataggaatatcattatatttattatttaaatatagatataaaaaaataattatttttaatttattctatatattgataatagtattatttaatacaggtatagtttatcaaatcaatatggttaattattttgtaatagtattgatgagagtgataagaggggaggaattaaaatgatctctattgggataatcgatgatgaacaagtatatttagataaaattaaagatattttaatcacaaattttgatgacattagagtctattcgtataattctgcgagtaaaatagataatgatttagattttatattacttgatattgatatgcccgatatagatggaattattttttcaaaacaacatcgtaattacagaattgtatttgtgactaattatgatactcggatcaaggaagcttttggacctaatgtatatggatatgtatcaaaaggaaatcttgaagaagaattagtagagaaagttaaagaagtgattgaggtaatcaaatgtgattattatgttacgtttaaggtaaatggaatagatataaatattaggattgacgatataatttactgtcagtatttaggtaatcatattgtttcaatagtctatcatgataaaaaaattaatattaataatagttctttgaagaaagtaaaagaggttttgaatgaatattttatagaaataagccaggatataataataaataaacatcgaattattaattttgaagatagatatgtgtatctagatggaatcaacagtaaatttgaagtaagtgtaagaaaaagaaagttagtgagaaaaagtttttacgagacatttagatgatagaagttattagtgaatatttttattgtttaatttatgttatcgcacttacatttactgcgagttatctattagaggaaaaggttaaatttaaaagagtagttataatggcaccgctatatgcaattgtaaattatcttgtagcaggggctactagtaataatttttgggaatacatgattgtgaattctattatcatagtcatagatttttgctatatttgtattttatttaaaaaaacaaatgtaatattctatgtttctttattccagttattttatatatttactgttaattctctaatccatgttattaatattattattggatttaaccgtgaggttacattatcatttagtattcaaaggcttatcatggtttttttaataaatatattaacagttatttttattgttgttttggataaattaaagattattcccactcagaaagtaataaatcgtcaagtaaaattatttatcatgctcgatatattagtttattatgcgatggtaattatatataatattggtgtagtaagattggttaatttaattacggtattagtattgattctattatttttgtggataatgtttttaaaaatattgtctatgtatgttgaaacaacaatcagaaatgaagaattgataatggaggatatatctaataaatatataagtaagtatcttgatttttataatcaggaaagtgataatttaagaaaattaaagcatgacctaaagaatcatcaacttgtattagaaagtctagataaaaagaatcaatatactcaatatattgatgaagtatttaagggaattggtcaagtagcatatattgaaagtggtaatatttatattgatgcttgtttatatgctaaacaacaagaatatcctgagataatttttgattttgatataagtgttgcgggtttggtatttaatgaaaaagatttaacatcattaatatttaatttaattgacaatgcatgtaacgaagcattaaaacacaataagttagtatcagtgatgattagatatactaataatttattaatcattagaattaagaacacttgcccgattaagcctaattttagtacggataaaggtgaagggcatggatatggattaaaaataattaaaaatattgttaataaatatcatggtgatttgtttatcgattatcatgatgatcaagtaatatttaatattaaaataaacacttaaggaggtatttttaacatatgaggaggtgtaaaaaaacattatctcgatttatgttatattttagaagtgaggaggatatgtagatgaaaaatatgattaaaaaagttattaaaaaaagaatagaaaaagtaaaacttaatggttataattgttcaccttgtgattattatagaccaaaaaaaccaagtaaataatagtacaaacttttgggagagggtaaatgtactaaatagtaatatttattaatggcatagccaaagcaaaaatttatataaataagattcaatataatcaatttctataaagatagaatcgtcgtacatatacattaaatgggataaagcgtatataataaaaagtgatttttattattactgagggttgttagcatggcttttttattatagagacgagattttgaacctttgtttagtaaattatgttataaaatagctggattaataatatgttcgattaaaaagagatattaattatttaatatctctttttagcgtgtgccgggcatggctggcatgaattcagttagagataaaccaaccacaggtagttaccgtcaagcgtagaaaaccacaacctgttgacagtaatgacatgggtgaaggaagtaatgtgatgtagcgattcttttgaacatgtgaacaggaacttaatgaggctaaatggtggataaggttgtgctacaaaccaaagtccaaatggtatatgtaagactaagacagtaaatcaagacattgtgaaagaatctctacttcgagaggctttatggacgaggaagcctagtaaactttaaaatcaatgatagtatcctcggtagaaaaaggtttatcgtaagaagttagatgaagtcatagtaggtagagatactggaggactaaaacgtttatagagtgcaaatttagtaatgaagacatctttaaatgtgctaatatagaattagggcggtatagtaggatgaatgtcataaactttattatattaccgaaaatattaggtattaagaaagggaaagacctggattggtacatcgcctaaattactatcttaagagtttgtaatttgatataaatgtagagccatatactagacctgcacgtacagttcaatgggtggggcaataaattattttattcctttaacctattactgattatttagaaaataaaaaatatttaaattgttgatgagccagggaataagttaaaaataatatagtattattagccatgttaggatatcctgatatggttttttatgctataatagtactattttatatagtattaatcaaaagttcattaatagttaataataaataaatatacttaggtcgtataaaataaaattagggagcaaatatgaaagaaaagttctatcgctttatgcaaggaaggtatggcattgatcaattaaatagttttttaatgattgtctgtgtcatttgttttatcgtaaatatgtttattggcagtattattttaacttttattgcttatggaacatggctatttgtaatatttagaatgtttagtaaaaatatttatgcacgtaatcgagaaaatgacaaatatttaaatttctttagtccacttagtcggtggttaaaactaaaattgatgagtaaacaagatccaagtaacaaatattttagctgtcctaaatgtaagcagatggttagagtgccaaaaggacatggaactgttgtagtaacttgtcccaattgtcaaaacaagtttgaaaagagaacataaagatgtttggctacgttgttatcaataaaccagaattaaaatttaaagaatttgatgtttatcagtcatattactgcggattatgcaaaactcttaaggaaaagtatggtagccgggctcaaatctctttgaattttgatttgaattttattagtatcttattgagtggcttgtatgaaccggaaactaagataggggaatcacgatgtgttatgcaccctttaagtaagcatacgactcgttacaatgaatgtgttgattatgccgctaaaatgacgattgttttaacatattttaaatgtgaagatgattggttagatgagcgtaagattagtaaacaggcatataaaaggttgttaagaaaagcatatcaagaaattaaggaagaatatccagataagttggcacatatcgaaacttgtttacattgtattaatgactatgaaagtcaaggaattacaaatcttgatgagatttctaaatattttggtgaagtaatgggtgaaatatgtgcttataaagatgatgaatggcatgatgaattatatgaatttggattttatttagggaagtttatttattttattgatgcttatgaagatattgaacaagatttaaaaaagggaacatataatccgtttaaagaattatatcaaacggatcagtttgaggataaatgcaaagatattttagaattaatgatatctgaagcaaccatggcttttgaaagattgccaattattgaaaatgccgcaattataagaaatatcttgtatggtggggtatggaataagtatgaattagttagacaaaaacgattggaaggtaggaaataatgaacccgtatcaaatattaggaatatcatctgatgcaactgatgatgaagtaaaaaaagcatatcgtacgttgagtaaaaaatatcatccggatgcgaatattaataatcctaatcaagctgcgtataccgaaaagtttaaagaggtgcagacagcttataaaacaatcatggatgatcgtaagcgtggttttacaaatcgaacttatggcaatacccaaggtgcggggtataatggacaatcacaatctagctatcagtataatggtaatgatcaagctgcttttaatgaggctgctggatttattaatgctcgaagatttcaagaagcacttaatattttggaacaaattaagactcgtaatgcaatgtggttttattatagtgctgtagcaatgaatggaattggtaataacattacagcagttgaatatgcgcagacggctgcccaaatggaacctggaaacttgcaatatctattatttttacagcagttaaaaggtggtcaaagacagtaccagacagggcagcagacttatggttcgccttttggcagtacaatgcagtgctgttatagtattatgttacttaattgtatgatgaattgttgttgtggtggccggatgtgctagaaggagatatgattaatgagtaaagtaattggaattgacttaggtacaacaaatagttgtatggcttacatggaagatggtaaagggattattatcccgaatgcagagggaaataaaacaacccctagtgttgttgctttcactaatgatggaaaacggttagttggtgaaaatgctaaacgtcaagctgttactaatccgttaaatacagtagcatcaattaaacgtgaaatgggaactgcatatcgtaaaaatattaatggtaaagactatagccctcaagagatttcagcaatgattttacaaaagctaaaaattgatgctgaggcttatttacatgaaccagtaacagaggcagtcattacagttcctgcttattttaatgatgcccaacgtcaagcaactaaggatgcggggcgaattgctggtttaaatgttaaacggattattaatgagccaacagcagcagccttagcttatggcttagaaaatagctatggacaaaaaatcatggtatttgatttaggcggtggaacatttgatgtttctattatcgaaattggaaatggagtaattgaagttttatcaacatctggagataatcatttaggtggtgatgatttcaatgaaattatagctaagtatattgttgatgaatttagaagaattgaaggcattgatttaagtcatgatcaagtagcaatgcaaagaattaacgaagctggtgaaaaagctaaaatagaattatctacaatgattacgactattgtgaatcttcctttcattactaatactagtagtggaccaaaaaatttagaggttgaaattagtcgagctaaatttaatgaattgacaaaaggcttagttgatcgggttgttattccaatgcaaaatgctttaaacgatgcacgtttaacaccacaagaattaaataaaattattttagttggaggttcttcaagaattccggctgttcaagataagattaaagaaattactggcaaggaagcaagtaaatcattaaatccagatgaatgtgtagcccaaggagctagtattcagggtggtaagttgtctggtgatatagcagctactggaaattttgatgttctattacttgatgttacaccattgactttatcaattgaaacgatgggtggtgtggcaacgccattgattgagcgtaatactacagttccaacgagtcatagccaaatttttacaacttctgctaacttccaaactcaggtagaaattaatgttcttcaaggggaacgtccattagccaaagataataaaagtttaggaaaatttaaactaaagaaaattaaacgggcaatgcgtggggtaccccaaattgaagttacttttgatattgatgctaacggaatcgttaatgtatcagctaaagatttagcgagtggaaatatgcaaagtattactattgaaaatacttcgaatatgtctgatgatgatatcgaaagagctattcatgaagctaaacagtatgaacagcaagatgctgttactaaagagcgtttagtttttaaaaatgaagttgaaaatttgattcttacggttgaagcagctttatctaaaaatggtaaacaaattgataaagcaatgaaatcaaatattaaaaacgaacttgcaagctttaaaaagttaactaaaaaagttgattttgaaacatgtgatcagattcagtttgatgaaatcaaaacagcaaaacttaatttggaaacagttgcagcatcattgttatcaatgcaataatccttggttataaccaaggattttttaggaggaaaatatgatagacgagattttagcttacaatcgggcatttgtgactaataaaggatataagccttatacgacgagtaaatatcctgatcgcaaattagcgattgttacttgtatggatacccgtttgattgaattattaccagcggctctaggaataaaaaacggagatgcaaaaatcataaaaaatgctggtggagttattgttcaccctttcggtagtgcggtacgaagtttattgattgctatttatgaattgaatgttgaggaaatcatgattatcggacatactgattgtggagtaggaagtatcgatatagaggcaatgttaaagaagatggaaaagcgtggaatcagtgaaacggttattagggatcttggatattgtggaattgattttaataaatggctgggcggttttgatgatgttgagatatctgttaaagaaagtgttagtttgttaagacgacatcctctgttgcctaaaaatattgagattcatggactagtgatggattcaaggacgggcgctttaagtttagtggaaaaaaattgattttttttgtttaaagagcatcatgagattctagttttgttactagaatcttttaattatgtaaagaaatacggtataatggaaaagtagaaatatcttaacttaatatatcttgtcttgttaactatttcacttgacaatgagtatgatttgtgggatattttatctaatgtacgagaactttgaaattaagtaaatggggaatagttaaatgaatgatattattgaagaaattcaaaagttaaaaaaagaaaaaaatgctgtcattttggcacattattatgttgatggtgcaatccaggatattgcagattatttaggtgattcttactatttatcaaaaattgctgttgattgtccacaagatgtaattgtttttgctggagttgaatttatgggtgaaagtgctaaattattaagcccaaataagacagttttaatgcctgataaggatgctgattgtccaatggctcatatggttgatgaatattttattgcccgtcttcgtaaagagtatgaagatctatgtgttgtatgctatattaactcaactgctgaaattaaaacaatgtcagatgtttgtgtaacatcatcaaatgctaagagaatcgttgaagctctaccaaataaaaatattttatttattccagatcaaaatctaggaaaacatattgctgaattagtaccaagcaagaatttcttattctgtaatggatattgcccaacgcattatcggattacaccagaagatattttaacagctaaagaaaaacatccgggggcacctgtattgattcatcctgaatgtaaaccagaatgtgtagagttggcagattatgctggcagcacttcgggaattattgattatgcaacaaatgatcgggaacatgatgagttcattgttgtcactgaaataggcgtgattcatgaaatggaaaaacgtaatcctggaaagaaattctatccagcaactgataaattagtatgtccaaatatgaagaaaaacacgcttgaaaaagtacgtgattgtctaaagaataatactaatcaagtagagcttgatgaagagtttatggaaaaagctaagaaaccattggaaagaatgcatgaattagcaaaataagaaggtgtaaataatgaataataattatgacgtaatcattgttggaacaggagctgcagggttatttgcagggttatgtttacctgctgatttaaaagttttaatgattactaaagataaagttgaaaatagtgattcttatctagctcaaggaggaatctgtactttaaagagtgctgatgattttgatgcgttttatcaagatactttaaaagccggtcgtaacgaaaacaatcctgaatcagttaaaatcatgattcagcaggcacctcaaattatgaaagatttgatggattatggtgttgaatttgatcgcgatactgaaggaaatttagcttatacacgtgaaggcgctcactcggaatatcggattttacatcatcaggatgttactggtaaagaaatcacttctaaattaattaaacaagttgaaatgcggaataatatcacaatggtagaagatgctacaatgctggatattattaatcatgataatattgcaacaggaatcgttatggaaaataatggtgaaattattcaaattaatgctaaagttattattcttgcaactggtgggattggtggattatttacccactcatctaattttagacatatcaccggtgacagttttgcaattgccttaagaaataatattgaactggagaatattaattatatacaaattcatccaactactttatatacaactaaaccgggtagaagttttttgattagtgaatcggttcgtggtgagggggcccatttattaaatcctgatatggagcgttttgttgatgaattattgcctcgtgatgttgtaagtaatgcgatcaaaaaagagatggataaatataatgtaccccatgtttatttatctgttacacatatggatccaaagcaaatcaaaaggagatttcctcacatatatgatcaatgtcttgctgagggttatgatatgtttacggatccagttcctgttgttccggctcaacattatttaatgggaggaatcaagagtgatacttacggacaaacttcaatgaataatctttttgcagttggagagactgcttgtaatggggttcatggcgctaatcgtcttgcaagtaattctttattagagagtttagtttttgctaaacgagcagccaaagttattgctgatggtattgacaagattagcctttacgaaaaagtagtagatttagatggctatgataaagaaaagctaaaaaaagaaaataaagaaataattatgaatgaaataaaaagaaaagatggtgaattctatgataaatggtgtaaatcttaaggtaaacattgatgattacatcttaagtgcgttgaaggaagatatcacgagtgatgatgttacaacaaatgcagtaatgccagaagctaaattaggacatgttgatttgatttgtaaacaggatgggatcgtttgtggtttagaggtattcgaacggacttttaaattattagatgaaaattgtaagtttacaacaaaatataaagatggtgatgtaatcaaaaatggtgattatatcggtgaagtaattggtgatattagagttttattatctggagaacgtgttgctttaaattatttacaacgaatgagtgggatcgctacttatacaagtgaatcagtagcaatcttaaaaggatctaagacaaaattattagatacacgtaaaactacaccaaacaatcgaattttcgaaaaatatgcggttaaaataggtggtggaactaatcatcgttataatttatcagatggagtattaattaaagataatcatattggagcagctggaagcattgctaaagcagttgcaatggctcgtgactatgccccatttgttcgtaaaattgaagttgaagttgaaactttagaacaacttcaagaagcacttgaggctaaagcagatatcattatgctggataatatggataatgcgactatgaaggaagcggtggcaatgattggtgataaagctcagagtgaatgttctggaaatgttactaaagagcgcttaatggagattgcagagattggggttgatttcgtatcttcaggtgcgattacttatgctgctccaattctagatttttcaatgaaaaatttacgaccatattaaatagataaagttaattgggctggtttaaggaataatcttaaatcagcttttttagttaataaaaattattttatgattaattaaaaaaagtgtagtttattgactaattaaaagggcatacttaatctggtgataaaatggaaaatgaatcatattggcagcataggattacgctgcctaaatacccgcagataaacaaaaattgtaactatgatgttgttattgttggcggtgggattagtggtgtaagtttagcttatcgtcttaataacagtaatttaaaagtagcattatttgaaagtgacacacttggtagtaaaacaactgggcatactacagctaaggttacttatttgcatggtgctgtttatgctgatatttatcaggtctatggccggagtaaagcaaaacagtatttagaatcaaattatgaagcttatcaggatattaaaaaaataattgaaatggaacaaatcgagtgtgattttaaagaaaatattgcttatgtaggagcaagtgatacaacaaatgcaaagaaacttgactgtcaaatcagattatttaaatcttggggatttgaggttttagaaaatcgattgaagaattgtcagatttctatgggacttaaacagcaggctatttttcatccattaaaatacctaaaaggattactagcgcaatgtaagcatattgacatttatgaacattcattagtaacaggcagcatgcatcaagatggattggtatgtttggaagttaatgggtttaaagttcaggcaagacaggtagtttggatgactcgctatcctcctaatttacaacatggttatttttttagaattattcaagaaaaagaacatgtcatttttcaagaaggacagagtaatggtaatagtattttagatttatcgactaattattctaaacgatatttagatgaacagcatattttaatgataaaacgaattgatgatcttaatcaagtttactggtatgcccaagatggaaagccgttaagaaaaataccttatattggtaaaatgaatgaacaagaatatgtggcctatgcttataataagtgggggatgacgttaagtcatgttgctagtaaattaatttatgacttaattattaatgatgaaagtaaatatgcctctctatatcagcctagttatggcaattatttaaaatctggggcggatatgctgaaactagttaaaaataattatcatgggatgataaaaaatcgtttagtttctagtaaaaaattaaagttaaagaagcagcagggtaaagttattcgacatcaaggacgattattagcagtttataaagatgctcaggaacgaatattttatttctcgccatattgtccgcatttaaaatgtgtggtgcagtataatgagattgataatacatggaattgtccatgtcatggttctatctttgattgtcatggaaaacttgtaagtggaccggcaactaaagatttaaaacaatattgaaaaagcatggagtttaatcttccatgcttttattacggataaaatattcagttaatctaagtggctgttttaaaccgtcaattagattactaggatcattgattttaacatgatatttaataaaaggctctaaaaattgtatataggcttctcttgtatcttcagtgacagtaataatgaaatttttttgatcgttaaaaattagtttaaactttatttctattccgatatcattagttcgcataaaagaaacttttctaactataatatttagttcttcaagattagcataattacgtttagataagtaattctctaattcattaagatcatctttcataaaaaataatttcatccggtcatgaagatttagtttttctttgtataacataaaattattataaaataaatagatactagaattacgataactataaacaaagcctagagtaattaataaggaaattggataaataataaaactaaatgagtgatctactgctattccgttagtcacaattaaattcttaaccatcatggtaattaaaaaaggaatagtaataaaacaaattaacttaaatactaatttgattaaagagggaatttgatagccgcatctataaattggttccatcatcttcaacatccttttttcgttttaacatatcttgataagaatatacgcagccacaataactttgacgataaagatgatagctgtcagcaaatcttaccgattttaaataaccattatttttcttaaaatcactaaataagaattttgttttattttgagcaaaacttgctccaatttcattgatccattgactatttttatgaggtgaaacactcaatacagttgtccaataatcaaaattgtgttcacagctatattgaaaggcatcattcatccttttttgataacaaagataacaacgtttccctccttctggttcatctttgtatctactaagcttatttaaatattcttttggtaaataaggttgttcaataactgtgatattttgatgataatcttgattaaactgtttaataaagctgagtaattcttgataacgacgatgatattcagcatttggataaatattagaatttgaataataaattgtaatttcaaagatatcagatagttctctaattacattgccgctacaaggaccacaacaaacatgtagtaagagacgtggtcgcgtattttttatttttgttaattcttctttaaattttaagtcataatttattttcataaattgattatagcatagtttattcttgaacgtataaataaattttatggtttaatatatgcaaaaccttcagtttgtttttgtgctaattcaacaacaccagctggaacgatcgtaataaattgataaatatcagcagcagtgaggtgattagctgctaaagcattgttacatgctataaaagttacgtgtttttttgataatgcggtaaacatttttgctatttcatgatcataatcgagctgataggcgataactgcctcactgtttgcaagaacttcgatttgataatcgatattttggacttgataataattgctcatattagtaacattgcctaaacaaagttgccattttgttaattcatcaacatgaaagataattttcatcatatactcctttaattaaattaaacaattgtatttactggtagcatctataaaattgttagtgattatttggcgctctaaataatatttagctagttgttcgtcattcatttgatctaattgatcatagaaataaagaattaattttaaatattgtagatcatctgagtcgagatgctcaagtaataatgtttgggcttctaaatatttatgttgctccattagttctttgatttttaaataaattaaatcgctttgagtataattagactcatctttaatagtataacttacagtttcgctattaaaaaataatttagctaaagctctggcagcactttgaatttgacggataataaaatcctctttatgatatgaaaacatgttctcacttcctctacttttaattctatcataataaaagaaaaaaatgtaaatctctttaagatttacattataaacatactatcaccaaaactaaagaaacgatatttttcatcgattgcttcctgataagctttaaaaataaattctttacttgcaaaagcactgatcaacattaataaagttgacttaggcaaatgaaagttggtaatcaaacagtcgattgcttcatatttataacctggataaataaagatatcagtattttcatgaacagatgtaaattttccatattttttcatattagcttcaagtgttcttgttgaagttgtaccaactgcgataattcgttgaccgttttgtttagcttgatttaatttgtcagcaacatcaggttcaatcatataatattcactgtgcatatgatgttctagaacatcatcaacttttaccggtctaaaagttcctaacccaacatgtaaagttacatcaaggatttcaattcctttagctttaattttttcaataatttcatcagtaaaatgaagtcctgcggttggagcagcagcacttccttcaattttagcataaacagtttgataacgattttgatcatctagtttttctttaatataaggtggaagtggcatcgttcccaattgatctaggatttcatagaaaattccttcatagatcatcttgaatactcgaattccttcttctttaatctcgacacattgagcttttaaaaggccatcaccaaaagtaattatagtatcaattttaacgattcgagcatttccaactaaacattcccacatatcgttgccttgatcttttaatagtaggacttccacatgaccgttagtttcttctttaattccaaataaacgagcgggtattactttagtattatttctaactaggatatcaccaggttttaaataatctataatatcataaaaatgtttatgttcaattgtctgctgattacgatttaagaccattaaacgtgaagtatcgcgtttatctaatggggtttgggcaattagttcttcaggaagattaaaatcaaattcacttattttcatcttaaaaagccctcttatatacgtcatgaccgtacttatctaaaaattcttctttaaagtcaagtaagcgatcttctttaattgcttcacgaatatcacttgctaacttcagtaaaaagttaacattatgaatcgatagtaatgttttaccaaagatttcatcacatttatgtaaatgacgaatgtatgctctagtatagtttttacaagcataacagtcgcattcagggtctagaggtgtaaaatcatatttaaatttctcattattaatatttaaacgtcccctgcttgtcattattgcaccgtggcgagctacgcgagtaggtaacacacaatcatacatatcgattccacgaatggcacattcgattagatcaattggattgccaactcccattaaataacggggtttatcttcaggcaaccatttgatagtatcatcaaccattttatacattacatctttaggttctccaacactagtccctccgatcgaataaccggggaaatccatcgcgactaattctttagcacactgttctctcaaatcagggaattcaccaccttgaacaattccaaataaagcctgtttttccgtgtttttgtgtgcttcttttccacgttttgcccatcgtaaagttcgttccatgctatttttcatatattcgtaggtacatggatatggggcacattcatcaaatgacataatcatatcagcacctagtttattttgaatttcaattgctttttctggtgataaaaacaatgaacttccatcaataatacttttaaattttacgccttcttcttcgatttttcgtgttttacctagagaaaaaacttggaaaccaccactatcagttagcattggtccgttataattcataaatttatgtagtcccccagctttttcgacaacatcttcaccgggacgtaaccataggtgataagtattagccaacaccacttgtgagtgcatttcttttaacatttctggggaaattccttttacggtagctagcgtaccaacgggcataaacattggagtttcgacatcaccgtgaggggtatgtaaaattccatagcgagcacccgattgtttacaaacgtgttttaattcataagttattgctgccataatcatcctccttaaagcaagcattattataccgcaatcttgctctatttacaattttagtttgcaataataaaaccctataaaattatagggctaaataagatttaaatgttgtaaagcatggtaaataccatcttcttcaatatctttagttacataataagcaagtttaaataattctggttcaccatttcccatcacaatcgcatgtttaacatatctaagcattgcttcatcgttaaaactatcaccaaaaacataagcatcatctttatcaagaccaaagtaatctagtaaaaattgaattcctgtagctttagagcatcctaaaggaacaatttctccaaagtcttctgctctagtaatatattcaaaatcttttgtaatctcagacttaaaagtttcaatatctccatgttcatcaaaccagacagctagtttatcgaatgacaggttagggtcatcaaaagttgataagttaaaagttggtgtagcttcatagcgctctttgactccttttaaaaaggggtgacgaatattttgatcaaaataaacggtattttttccttcaagaacaccttcgacattagtttttctaatcaaatctcgaacttcaaaacatctttcttgactcaatgtttttgaaaataacacttcatcatgataacgaatatatgttccacaaccacaaacataaccatcaggatctaattccttgatacactcatcaattgatgaaaaaggtctgcctgtattaataaaaatcaaatgtccttgttcttttgctttttgtagtccttcaactgtacttttagggatagtgtgtgttgtttctgataagattgtgccatctatatcaaaaaacataattttatttgttgccataattacctccatgataattgcattatacaataacttacttttatcaacaattgattatctaaaatagaaaaaatatttaattaagccgctaattaaatatttctaaaagtatatttcttatatgaagcaagagaatctttgaatctacgtttactaataggcaacacggtaccatcttcaagagttgtacttttattctcaatattgataacatatttccagtgaactaagtaagactggttgatcatataaaaatcttcacagttaataatgctttcgatattagatagtttatatttatttgtcttaataactctatcagttgtgtgaatataacaaatatgaccataactttcacaataaagaattttcttacatttaatagttgttaaaccatttttatcttgtaatgatataacacgattatcacgatttaatttagaaattaaatgtttgattggctggatcaatcctgtttcaagattttcttttttaacgaaatcaaagggatgaacactaaaagcattaaaaacaagatcatatttattagtaatgaaaataatagtagtatcatcatggttctggagatagttttgagctaattcaatcccatttaatgatggcatatcaatatctaagaacagcacatcataatatgtatccatatgaagtttttgaggattattaaaacaagtaatagtagggtcaataccgacactgttaaaaatactttttactttatattgaacaatttgtaaaattctttgatcatcatcaactagtgcaatattatacataattatctccttttaaatgctcttacttattatacacaatcaataaaatagttgctgaggatactttaaattggcctaaaaaattatattttgaccgaatttgtcaaaatatagcccgaatttgtaaaagtgcggacagggcatttaaattatgataattttaatagcgaggggtgaagattttgtttgaattcttagcagagaagataacgcaagtgttagaaacaaaaaatatcattgtaagagatcgggcaatatataaatatgggatagagacgtggatttctgcattagctagtatcttattattgttggttgtggggatcatctttaattgtatactagaggtaataatatatgaggcggtattctttattttaagaagatttacgggaggctattattgcacaacacattttgaatgcatgagtctgtatattgcaatttttactctttatatggtattaagggaatatttaaaagtatcgattgttatggtttgcatagccatcgcaatatcattaataattattattagtctttcaccagtacaatcgaacgatcaacaattaactgaattggaacaaagaaagtatcacctctatagtaccttgctatccataattgtaggtatttcctgtattgttttaagatttttaaatattccagtttattcaattctaacatattcgttttctttacttgctatcctaatgctaggaggaaaggtagtcaatcgtcgcagttgattgcctctccaaattaatttatttaaatatttataagggttagttattactaacgctttttttgttgttggtattaaagttaaagataatcgtatagtttattagtagtgaaaagagagatgatcaaaatatgtatacaatcttacaaaaaactacgaattatcattgttttttttattcaagcaagatacaatatgaaagtataaaataatgtagggggaaatagtatgtacaagattgtcaaaaaagaagtactaaatgatgtcgttgaactgatggaagttcatgcaccatatgttgctaaaaagtgcgaaccaggccaatttattattttacgcgttggtgaagatggtgaaagaatcccattaacaatcgctgattttgaccgtgaaaaagaaacaattacaatcatttatcagattgttggttattcaactaaagaattagctaaattaaatgaaggtgatgaattgacagattttgttgggccattaggagttccaacagtattacatgaggctaaacatgtaatcggtgtagctggtggggttggtagtgcaccattattcccgcaacttcgtgaattagcaaaccgtggtgttgatgttgatgtaatcattgggggacgtgaagctcaatatgtactattagctgatgaatttaaaaagttctgtaaaaatgtttacattgcaactgatgatggttcattaggaactaaaggttttgttactaatgtattaagtgatttaattgaaaaaggtgaaagctttgatgaagtaattgcgattggaccagtgccaatgatgaaagcagttgtaaatgttactaaacctaaaaatataaaaacttcagtatctttaaatccaattatgatcgatggaacagggatgtgtggatgctgtcgtgtcagtgttgatggaaaaattaaatttgcttgtgttgatggtcctgattttgatggacttcaagttgattttgatgaattaatgctgcgacaaagaatgtttaaggaagaagaacatactgttagtgaaaatgctaatcgtatgtgtaatttaatgggaggtgtcaaataatgccaaacatgtcattaacaaaggtagtaatgccagaacaagaaccagatgtaagaaataagaattttgaagaagtagctttaggatacactaaagaaatggcaatggaagaagctacacggtgtttaaattgtaaacatcagccatgtaaacaagggtgtccagttggcgtaccaattcctgaatttattcaagaagtagctgctggaaatatggaagaagcatacaagatcatcactagcgaaaatgctttaccagctatttgtggtcgtgtttgtccgcaagaaaatcaatgtgaaggtaaatgtgtccgtgggattaaaggtgaagcagttggtattgggcgacttgaaagatttgttgcagattatcatatggctaatggaaaagcccctgaattagatattaagagtaacgggattaaagttgcaatcattggttctggaccagccggaattacttgtgctggagaacttgccaaaaaaggttatgaagtaactgtttttgaagcacttcataaaacaggtggagtattatcttatggtatccctgaattccgtttaccaaaagctttagtacaaaaagaagtagatagtgttgctgctttaggtgttaaatttgaaactaatgttgtagttgggcgttcaattacaattgatgaacttcaggaacaaggatatcaaggtattttcattggtagtggggcaggcttaccacgttttcaaaatattcctggtgaaaacttaaatggtgtatatgcagcaaatgaatttttaacacgggtcaacttaatgaaaggttatgaattccctaatcatccaacaccagttaaaattactgatactgtatgtgtaattggggctggtaacgtttcaatggactgtgctcgtacagcaaaacgtttaggtgcaaaaaatgtttatattgtttatcgccgtagtgataaagaaattccagctcgtgctgaagaagtacatcatgctaaagaagaaggcattatttttaaattattaactaacccagttgaaattcatggtgaagatggatgggtcaaatcaatggaatgtgttgaaatggaacttggagaacctgatgaatcaggaagaagaagaccagttgttaaagaaggatcgaattttgtgattgaaaccggaactgtaattgtttcaatcggacagagtcctaatccgttgattcgtcaaaccacaccaggattagaaactcaaaaatggggtggaatcatcgttgatgaagattctatgaaaacaagtaaagagggcgtatatgctggtggtgacgttgttactggagcagctacagtaattctagcaatgggagctggtaaaacagctgctaaagcaatggatgaatatcttgccaataaataattgaattcctaggtaatccctaggaatttttttaaaataaaatggttttcttgttataatggtaaataggaggagcaaaatatggaacaaagtataacatttgtggatgtagaaacacctaattatcaaaataatagtattagttcaattggtgttatcaatgttgatggtgatggtgttgtaacaactaaatattttcttgttgatcccgaggcacattttgaccgtttcaatatagaattaacgggaataaccccagaaatggttgctgaccaaccaaatttcaaagaagtgtggtctgaaatagaaccatattttacaaatagtttagtggttgcccataatgctgtttttgatttaagtgttatcagtgcttgtctgcaacgttatgatctgcctatcttccctattttttatacatgtacttatcgaatcagtcgcgctttaaagattccatccaatagttataaattaaatgatttaagtagttattatcatgtaaccttggataatcatcataatgctttagcggatagtaaagcatgtatggaaatattttattatttattaaaagaaccaaatttggaaactttagatcagtatgttaaatgctttgaaccaaccaaaggaaataaagataataaaaaatatttagaggtactgattggtcttttaaccggaattggatttgataactatttaaataaaaaagaaattagttttttaaataactggttaactaagaatcagcttccttatgagtatgctaatattgtcaaggaattaaaagctgttttgaaaaatgaatatataacacattatcaatatttacatattcttaatgaactccaatatatgaaaagtattaaagctaaaaatatacgttcattatatgagtttatggctattttggaagggatcagttgtgatgaagttattaatgatgatgaaattatggagttaaataagtggatgaaagaaaatgaacaatttaaaggtacttatcccttcaaccgaattttaaataaattagagaagattatcattgataaacaaataagtacaatagttacagatgagttgttatattatatcaaaaatttctttaaaccagagcttgatcaaggtgatttatttgatgtcaagaataaagttatttgtttaaccggtaatttttgttttggggaacgaagtcaattagaaaaacttattgttctaaaacaaggaattataagtaaaagtgtgacaaaaaaagttgattacctggttttaggaagcaaagggtcagctggatataaatatgggaagtatggtgctaaaacaaataaggctttgacaatgaaaagtgaaggtcataagattgaattaattagtgaagccagattaatggaagttttgaaactttctaaataaattgatgtgaggtagatgatgaaagtattggtgatttattgtcatcccagcaataaaagttttacagctaggatgaaagatgagtttattagaggattggaagacggagggcatacttgtcaacttattgatttgtatcaaattaattttgatgaaacatttagtgaagaagaatacttaagagaagccttttatgatcaagccttaaaagtgcctaaggatgttcaagcacatcaaagactaattaatgcaaatgatgcggttgtgtttatttatcctgttttttggaccgaggcaccgggaaaactggtcgggtggtttcaacgcgtttggacttatggttttgcttatgggactgagactaaaatgaaacagttagataaagtactgatgcttgtcacgatgggtggcgacctaagtgaagaaattcgtcagcagcaggttgcagcaatgaaagttgtgatgttaggagatcgaattggtgaacgtgccaaaacgaaggaaatgatcgtgtttgaccgtatgtcccgagattatccggtacgtgaagtaaattattcgaaaaacttaaaacgtgcctacttattaggaaaggaattttagaagaatgtataaagaacgggtcaaagaaaatttagaaaccacaagattacgattaagaaagtttaaattaagtgataaagaagcagtttataaatatggaagagatccgcgaactctaaaatatcttgaatggattggggtgactactcgtgaggaagctagaataagcattgaagaatattatttaagtcgtgcaggaatttatgcaattgctttgaaagaaaatgatttatgtattggagcgattgatattcgtttagatgaagctaatgataaagctagttttgggtacttattggatcccgattactggaatcaaggatatatgagtgaggtattatcacgaattttaaaacactgttttgaagacataagagtaaaccgggttgaagcaattcattatagattaaatccggcctctgggaaagtgatggcaaaatgtggaatgaagcaagaaggaataggaattcaagagctaaaaataaaaggcctttatcatgatgtggtgcattacgcgataactcaagaaatgtggcaaagacgttgatatcacgttattgcaacgcaaagttgacaaaaataattaaagtgcaatggcaagttggtagtaaaaaagtaactgcataattatgatttgggtgaggtgataaagatgagtttaagtgataacttaagagctttaagaaaacaaaaggggtattcacaagaacaattggcagagcgtttaaatgtttctaggcaagctgtttcgaaatgggaaagtgataatggttatccagagatggaatcgttaattattttaagtgacctgtttgaatgtactattgatgatttattgaaaaatgatttgactcaacataatccaacagccaaacaagcatatgataaacattatagtctaatagcaaaggcctatacatttggagttgtttcaatcttgctgggggtatgcgcatatctatttgctgaaatttatttttcggaaaatacaaaatctgagtttattggcgaaattattttcttgttttttgttttaattggggtaattacatttgtttattttggaatgaaagatagtcattttaaaaatagtcattctgaaataacagattattatacggatagtcaaagaagtgaatttaatcaaacatattcattgagtatcgcaactggggtaggagtgattttatttgcagttgttttacagattttaatagagaatttatataatgaaaatctagctaatggtttatttatggtgtttgttactattgcagttggaatttttgtatattttggaacactaaaaagtaagtatgaccaagttgatttaaaagttattaagcaagaaaaaaggaataaaaaagtctcaatatattgtggtatcattatgatgattgttacagcaatttatcttggctgctcatttactacaaacgcctggcatatttcatggattgtttatcctatcgggggaattatttgtggcattgtttggctcctttttgaagcacatgaagaagattagaaaaatgctaatcttttttgttttgcgcggataaatagcaaaatgtaaattattgtatgtagttatattaagagggtcatgttaagattaaagggtaggaggggataattatgagcttaggaaaacggattcagtcgtatcgaaaacaaaaaggattatcacaagagcagctggcatcaagattaaatatttccagacaagccctatcaaaatgggaatctgatataaatgtccccaatattgataagattatggatgtagcaaaagctctagaaatcacgcttaatgaattacttggtttagaagaagattcaaatgatgagtatgctaagttggaaagtattttaaatcaagtggtgttaactcaaaataatgagattataagaaacaagaaatatttaaaaatgggtttggtaattgggacgggaatatttataattcttgctcttgttatgtggagtgttttaaatgatattaaaggaattaaaagcacgattggaaataataatgcaggtttaagtaatcagatcaatataatcaataaccaattatcatcattagaaaattctctttttgatcagcttcaagaacaattacaagcccaaggttctttactaagctcttttgagcttcaaattgaggatattgattttaaaacacagacaatgaaagtcaaaattgatctagttgttaagaattatgaggatactagtagtgtggtagttgttttagattatgagcattatgatgatcggtcatatctattaacattaagtgatggacattttaagacaagtgaagatttacctattgataatattttaaatgctgccgtgacaattggaacagatagtaaacaagcacagttattaaaaaatgttgcagattatatattgcctgaattgaaacttaattatggtgaagtttatgaaataatctatcagcaggattcgttaaacattacgttaaacccagatgatactgtaaatttgaatgagagtggtatattgtcaaaatataaaaaagataataaattagtaaaattcgatgggttttattatttaaatgatcagaagcatactgttaaagttacaacagataagcagagaaatattcttttttcaattcctgctaatgactttaagaatggtgataaactaaaaatagtaattaatttggtcgataaaacggggatcacttctcaaattgaaaagaattttattgtagcaattatagatgattcagttagtctgtatgaagaataaagcactagtattatattagtgctttttatcatgataaaactaaataacatttagatattatagtgataataaagttagaaatttctaaaacaattattatcatgataaaaaatactgttattttgtttagaattcgtgtataattgccatgaaggagtgataactatgtataaatatttggaaccatatgcagcaatgatagaatttttagggaaggctttaggcgataacgttgaaattgcgttacatgatttaacttcaaaagagcaagaaatcgttgcaattgctaataaccataactcaggaagagaagttggggctaaattatcaaatttatcattacattatttagaagaaaaacagtatttagataatgattatgtaatgaattacaagacaactggaccagatggaaaattaatgcgttcagcaacttattttattaaagagcctggtaaggaaatgccagtaggtatgctttgtatcaatgtaaatatttctgatttagaatatttaacatcgacgattaaaaaaatcttaggtattaaagatgaaaaagatattgagtttaagatggataatccagttgaaattttatcttcaccgttagatgaaatgattgatctttatattaaagaatgtttagagaaaatgggtttcccaagttatttcttagcagaacgtttgaatgttgatgaaaagatcaaggttgttaaatacttacaagaaaaaggtacttttaaagtaaaaggagctattgttttagtagctgaaaaattggcagtttctgaacctacagtatatcgttatttaaaaaagatggaaaaataggagagtaaaatgaaagaattagtatatgtaagtggtcataaaaaccctgataccgattcaatctgttcggcaattggatatgcttatttattaaaagcaattgaccgttataatgccgtaccagtaagattgggtgaggtaagtcgggagactgagtatgttttaaaaagatttaatttagaaataccaactttattaaaaactgttaagcaaaaagtagaagatttaaactatgataaagtaactgtattttcaaaagaattaacattaaagactgcatggtctttaatgaaacaacagaacttaaaatcagcaccaatcttagatgatcatgggcaattactaggattattatcaacttctaatattgttgaagggtatatggaaaaatgggatagtagtttattaaaagatgcgcatacaccaattgaaaatgtaattgatacattagaggcatcagtaatttatttaaaccataatttaaaaacaatcgaaggtgatcttcatattgcagcaatgcgtggtgaagaagctagtaaacgtgttagaccaggagatattgtaattattggtggtgatcgtgatgatgctgttaattcaatgattgatgctgaggtttcattgattattttaactgggtctttgggtgttgaagctgaagtactaaataaattaaaagaaaagggaatcagtgttatttcaacttcttttaatacatatttaacttcacaacaaattattcaggcaattccggtagaatatatcatgcaaaagggagatttaaaattattctcaacagatgatacattagatcatgtaaaagaggtcatgagtgaaacaagatatcgtagttatccagttcttgatctaaataatcgttgcgttggaagtatttctcgttttgctttattaaaaggattaagaaagaaagttattttagttgatcataatgagcgtggtcaatcaattcctggaattgaagaagctgatattttagaaattgttgaccatcatcgtgttgccgatattcaaacgatcggaccattattatttaggggtgaaccattaggatcaacggcaacgatcgtaacaaagatttttgatgaaaatgatgtagaaattcctcaatctattgctggggctttattaggagcaattatttcagatacattattattcaaatcaccaacatgtacacctgtagacactaaggctgctcgtaaattagctaagatcgctggggttgatattgaagaatttgctatggagatgtttaaagcaggaacttcattagttggtaaaacagttgaagaaatctttaatcaagatttcaaaaaattcccatttgaacaaggaactgttggtgttggacaagttaattcaatggatattgaaggatttatgccatataaagcagatatgcttgactatatggacaaatttgcagaagacaaccgtttagattttactttattattattaacagatattattaatgctaatagtgaaatctttgttgctgggcctaaaccatatttggttgaagaagcatttaatattaaattaaatgatcatcaagcgacattaaaaggggtaatttctcgaaaaaaacaagttgttccagcaatcacagcagtaatgagtaaataagatgagattagataaatttttgaaagtatcgagaattattaagcgtcgtactttatcaaaggaaattagtgaaagttcacgggtaaaagttaatggtaaagtcgctaaaccaagcacaaaacttaaagttggtgatgaaatcgaaattgaatttggacgtagtcgtctgactgttaaggttaaagaacttcgcgaacatgtcttaaaagaagatagtacgatgttatatgaaataattaatgaagaacgaattgagcgagatttaaattagaaaccagtattggtttcttttttataaaatgatatatttttattatattggttgacttttactcattagaaaagttatcataatatatggcgataggattgttactattagattaggcaagaccaaattggagaaatacgaataacgtgtagctatatgcagttgttttcgtataaatttcaatttggtcttttatattttatttaataggattaattatattatcgctgttctatacggaaaaggaggataagatgaaaggattaaaaaaattattttcagctatgctggtgctgacaatgctttttgggacgattgcaaatgttggtatggcaaagatttatgcagctgaagaaggaatgaagcgggtgttttctattgatgccgggagaaaatacttttcagaagaacagcttttacaaattattgataaagcttatttaaatggttacacagatgttcaaattttgttagggaatgatgcattacgttttttcctagatgatatgtcaattactgttgatggtaagacatatgcaagtgaagcggtgaaaaaagcaattacagcaggaaatgatcattattataaagatccaaacggtaatgctttaaatgagactgaaatgaatcggattgttgcttatgctaaagaaagaggattacacattattccagttattaatagtcctggtcatatggattctattttagttgcaatggaagaattagggatgaaaaatgtacgttatagttataatggaaaagaatcagaacgtacagttaatatcgaaagtgatgaagctattgcattcactaaagagttagtaaaaaaatatgttacctattttgcaaatgcaaatgtatctgaaatcttcaattttggtgctgatgaatatgccaatgatgtgttcagtaatccaggatggggagaattacaaaaaattggtttatatgatgaatttgttgtttatgctaacgatttagcaaaaatcattaaagatgcaggaatgaagccaatgtgttttaatgatggtatctactataataaaaaagatagttctggaacatttgatcaagatattatcatttcatactggactgctggctggtggggattcaatgtcgctaaagctgaatatcttgtaaataaaggtcataagatcttaaatactaatgatgcatggtattgggtattaggaaatattgatgccggaggatataactacaatagtactgtaaacaatattaacaataaaaaatttactgatgtaacaggtgcttcaaatgaattaccaattattggaagtatgcaatgtgtatggtgcgatactcctagcaaagagcatgatatggatagaattataaagttaatggatctttattcacaaaaacatacagattatttgattcgtcctgcagattttacaaaagttgatgaagcaattgctaagattcctgaagatctaagcatttatacaactgagtcagtagaaaagcttaatacagcaattgataatattgatcgtagcatccgagttacagaacaaagtattgttgatgggtatgcagccgctattgaacaggcaattatcgatctaacattaaaagatgcagattattcaaaagttgacgaagcaattgcaaaagctgaggctttaaataaagatgagtatacagatttttcaaaagttgatgctgctgttaaagctgttaaacggggcttagatatcacgaaacaaaaagatgttgatgcgatggcagctgctattaatgaggctcttgcggcattagaaaagaaagaggcagtaacaccagataaaccaaattcagaaaaagtagattcaccaaaaacaggtgatacaacaaatacaatggtttggttaagttttgcggcaatgagtattttagctagcacattagttttaaaaaaacgtaaaacatattaatagacgataaaaataaatagttatagtcattgattcataataagaagtctaattttattaaagttaggcttcttttatattgcagttaaatattagcagcgcacaaagaaagcctttacatttataatgatatagtataaactttatttataccaatgaattataatcattctattaaatggagggaactatgaagagagtaattagagaaattaaaaaagctggttcgattgcaattattatagcaatgctgttaagtttcgtaccgacaggaatttttgccttaaatgagtccaattataaagaaccattggtatttgcggattttgaaggtaatgattcaaatgttgacggatcaaacaatgcggcggttagttttattgagggatttgcaacaggaacgggaaaattagtagctaaactagagcttgccaatagtggtgatcctagtattagtgaacgtagtttggtaataacaaaagagacatcagtcgatgtttcaaactacaagtatttaactttttggatcaaagacaatggaacgaatagtgctaaagtccatttaattgatgccagtggtaatgctactagtggcaactggacagggaatgtaacggcgggtaaatggagtcaattatctgtatctttagatcaatttaaaaatattgatttaagtaagattactggtgttgttatcggtgaatggaataaaggtagttatttaattgatgatgttcaatttacagatgtcttggctaaagatttaaaattaagtgcaagtaaaaacacaggtacatataatgatagttttgaagttacccttacggctggagaaggacaatcaatctattatacagttgatggaagtcagccaactattagcagtactaaatatagcaatagtcttacaatcgatgagtctatgactttaaaggcaattgtagtcgataatcaaaatattagtgaagtttatgaatttgattatattattgatcatcaagataatcggatttatacacctgtagttgttcaaacatttgaagaccaaaataattttagtgcagctaatggggcattgggaacaattgttacaaatgaaaaacatagtggtgaacaaagtctaaaatatgtaaaaactaagagtgaagccgctagtactagtaaaggaagtataaaaattgattttaatcatgctgttaatgcggcagatttaaaatatttaattttctatatcaaagatacccaaggaagtaacacccttcaagtatcattgattgatactgatggaaaggagtcagattttggatggcgaagtccaagtacaacaaaggataaatgggtccaatattgtatcaaagtatctgattttaataagatcgataaaactaaaatagcgggaattagaattggtgaatggaacgcaggaacatattatctagatgatatttattttgataattatttatattcgggattgccaagtttagtaccgactaaaccggaagccaatataagcgatggttatatttttaaagataggttagcagtaactttaaaaaatgataacaatgcaccaatgtattatacaatggatggtagtaccccaaatgttgatagtactaaatatagcggtgaaatagaattatctaaaacaacaacactcaaaacagttagttttgataatggaaaatatagtgaagtagtggaattagcatatataaaagatacaaatatccctagtgatgttaaagctgataaagtagcaggaaagtatacaaaaccaattaaagtaacattaagtaatgaagataatcttgctatttattatacgattgatgggtcgactccttcaaaaacaagttctaaatatacaacgccaatttctataggtgaaactaccgtgcttaaggcggtaacttatcaaggtgatagtgctggaaatgtaatgacatttaaatatcaatacccaacagtgccatccgaagttacagcgagcattccggaaactaaatttactagtagtaagacggttgaattaattagtgatattgatgcgaatatttattatacaacagatggcagtgttccaagtctgacttcatcacgctatgatcagcctcttacaattagtaaatcaatgacagttaaagcaattgctgaacgagatggtaaaacaagtgcagtaacaacattagattatattattgcgccagtagctgttcaagctgacaaaccagcgggaacttatgatggttcagtagtggtggaatttagagttccaaataatgatcaagtagaaatttattatacaacagatggcagcgttccaacagtggcatcaaatcattatactcaaccgctacgggttagtgaaaatacaacttttactgttggagcaacatataaaaatagtaatgatattggtgtggttacaaatcacacatatataattaatccgattactgaagctaaggccccagtgattacgccaggtagtggtacttatggtcaaaggcagttagtgtcaatgagcagcgatactcaggatagtaagatttattatacagtggatggctcaataccttctagggacagtatggagtttaaggaaccgttttatgttaaacaagatactgtggtcaaagcaattacagtaacaaaaaatggcattagtgagataactgtaaatgaaattaaagttaatcaagaagcttcaaatttcttaaaaacagatggaaaagtaattcgtaataattatggtgctggagaaaaaattcaattaaaaggaactaatgttggtggctggctcgttatggaagaatggcaatgtccaactagcgcaccagatcaaaaaacaatgctggaaacatttacaaaacgttttggtgaagcaaaagcttgggagttaattaatacttatcaagataattggtttacagaagctgattttataactttaaaagaagaaggagtaaattgtcttagattaccaatcacttattttgagatggctaatttagacggaacgcttaaagagactgcatttgatcgtttagattggtttatagaagaagcagctaaacatggaatctatacattgattgatatgcatggtgcatttggctcacaaaatggtaaagatcattccggtgatattacttatcctgatcaaggtgatttttttggaaaagaagaaaatattcaaaaaacaattaaattgtgggaagcaattgcagctcgttacaatggaaatgagtgggttgctggttatgatttattaaatgaaccaggtggagcattaggtactgaacagtttgaagtgtatgatcgtatttataaggcagtaagagcaattgatcaagatcatatcattcaaattcaagcaatttgggaaccaacgcacctaccagctccaacattatatggctgggaaaatgttgtttatcaatatcatttctatggatgggatgatattaataatttagaatatcaaaaagcttttattaatagtaaaataaaatatgtaaatgaagatactaattataatgtaccggtttttgttggtgagttcactttctttacaaatatggatagttgggaatatggtttaagtgtttttgatgaacaaggctggtcatatacaagttggacatataaggttgctggagcaaatagcagctggggaatgtacacaatgcctaaaaatgacagtgccaatgtgaatattaatactgatgattttgaaacagttaaagcaaaatggtcaaattttgactttacgagaaatactagtattgctgatgtattaagtaaacattttaaaatagtaagtagtgatttgattgctccggtaatagaaggtaatgatgcggctgttatggttggtgtaaaagcaacagtaagtgaaatcctcgacttatttattaaggatgatcaagatggtgtgattgatattgcgaaagcagatattacaactgattttgattgtagtaaagcaggggtatatacagtaacagtagaagctagtgataaagcaggtaatataagtgaagcagcttttacaattacggttaaagaagaaacagttattgatcctgatgtggttgaaaaaccagattcatcaaaatcagaagtttcagtaaataagccggtcaaaacaggggataatgaaaatattattggtgatttaatgattttaggattatcaatgatagcaggtgttatcttattgaaaagaagaaaagaaatttaattagaggtagtaacgagataaattctcgttactatttttgatataatgcatggttatgtatttaaagaaacgttataataaatatatggcacaatgaggaggcaatttatgcgaatattaaaacgaatatcattactattattatcattagtaatgataatatctttgagtggctgtacagcagatactaacaacaaagatgaacgagcgagttttgatcgatttattgaaagacaatttattgaaacaatggaaagtgattatacaactgcgcatgtttttttagaacatcctgagaattttgatgttgatatttcaaagttaacagtaaatctaggggtgcgattagatgaagaaagcatgagaaatcaggagaagaaagatgctgattcgtgggcggagtttaagaagttcgagcgttcaaaactaactaaagaacagcaggatacttatgatatttatgaatttcaaaataatctagctcgtgaaatgagcgataataaatttgattattatcaacaattgtttgagagtatttctggaatacattatcagattcctactatgttagctgactggtcgcttagaaatgaacaagacgtaaaggatattattagtttagtgaatgatgtcttaccatatttacaaggagctattgactataccaaagaacaggcaaaacgtgatttgctaatgatagatgttgatgcggttagagagtattgtgataatgtgattaaaagtggtgaaaatagtttaattttatctgatataaataaaaatatagatactttaaatttagaagagagtgttggcaatgcatataaagagcaattaaaaacagcttttaattcttcttttattcctgcttatcaagctgttaaagatttaatggatgaagtaagtctaaccggcaataatgaagaaggattagtcaagtttaaaaatggaaaagaatattatgaactgttattgcaaaatgccgttggttctgataaatcagtaatggaaataaaagaattaatggaagacagtttagacaaacatatttccaagcttcaggagaatgtgattaaaaatgctagtgttagagaatttcttactagtggtggtgaaataccaactacaaagtatactagttatgatgaaattctagatgatattagtgctcaactgtttgaagattttcctagtgttagtagtttatcttataatattagggatattaatgaagaaatagcatcttcttctggcgtcgcagcatattttaatattccgcctttggatggtaacggtataaaacaattacgggtcaatccatcgactggtgaggtatcagatcttgatactttttcaacagtagcccatgaaggttatccgggacatatgtatcagtatgcatatatgtatgaaaatattcaatccccatatcaaaaggctttagctaattcaagtgcttatacagaaggatatgcggtatatgcccaattttatgcatataaatatctaacaggcattgataaaaatgtattagaagcgcttaaggaaaatgaattagcaagttatgatataatgattctttgtgatattggaattcattatgagggatggtcacttgatgattttagtgactttatctctgaaaagggtattaatctagaggaggacagtttaaaaactcaatataaacaattgcaagctaatccggctgcgtttgagccatattatgttggttatgaagaatttatgcttttaaaagaaacagctcaaaataaattgggtgataagttcaatgataagaaatttcatgaggcaattttaaagagtggaaatgcaccttttacagttgttgaaagaaatgtagcagcttatattaagagtgctaaataaaagattttatatgaatctaaaaaacagttagagtattatgattgtaagttggaaaaaattggtatactatatgtatcataagaaaaggagatgtatatatgtacggaaaacttgcttgggaaaagtataatgatgaacaaattaatgatattatgacttttaatgaaggttataaaaattatattaccaaaggtaaaacagaacggttatgtgtcagtgaaactgttaaactggcaatggcacatggatataaagagttaaatgaggtagatattttaaaaccgggtgataaagtatatgttactaatatgaaaaaaaatattgctttatttgttattgggaaaaaaccgctagaagatggaatgcgaatcttaggtgctcatattgattcaccaagaatggatcttaaacaaaaccctttatatgaaagtgaagggtttgcaatgcttgatacacactattatggtggggtaaaaaaatatcaatgggtaactattccactgtcaatggtaggtgttgtagtaaaaaaagatggtactgtgataaatgtaaatattggtgaagatgaaaatgatccagtcgttggaattagtgacctgttagttcatttatctgctgatcaattgaaaaaagatggtgcgaaagtaattgaaggagaagacctagatgttacttttggaagtattcctttaaaggatcatgaaaaagatgctgtaaaggcaaatgttttaaaaattctaaaagataaatatgattttgatgaagaagattttttaagtgcggaaattgaaatcgtacctagtgggaaagctcgtgactatggaatagatcgtagtatggttgctggttatgggcatgacgatcgtgtttgtgcttatacatcattaatggctattttagatatggaaatgcctgattatacaagctgctgtattttagtagataaagaagaaataggaagtgttggagcaactggggcacagtctttattctttgaaaatacggttagcgaattattgttgaaacaaggaacagatagtttcgttaaaacaagaaaagccatggctaattcaaaaatgttatcaagtgatgttagcgctggagttgatccattgtatttaagtgttaacgataagaaaaatgctgcatatttaggtaagggaatagtttttaataaatatactggagctcgtggtaaaagtggttctaatgatgctaatcctgaatatatggcagaaattagaaaaatcttagatgatgataatatttattaccaaacagcagaattaggtaaagttgatcaaggtggtgggggaacaatcgcttatatccttggaaattataatatgaatgtaatagatgcaggagtagcagtgttaaatatgcatgcaccaatggaaattgttagtaaagtggatgtatatgaagcttatctagcatatcgcacattcttgaaacaaatttaagatatcttcggatatcttttatttttggatttgaactaaagatgataaaccataagataattgcagataacagtgataagttatagaaagttgcccgtttattaaaccattttcttgcttagaaaaagacttgcaggaattgtaattttagttataatgttttaggcttggaggtggaatggatgaagaatatgactcagggtaatcccctaaaattgattttgatgttttctatgccgctgatgttaggaaatattttacaagagttttatacaatcgtagatacgattattgttgggcaatttttaggggtaaaagctttagctagtatgggggctgcaggctggatccaatggatgctccttagtgttgttatggggttcgcacagggcttctcgattaaagtcgctaatttatatggtgcaaataaccatgagggaatttctaaaacaattggtaatattgttattgcttgtcttgtaattgcattacttttaacgattagtggtgagctgataatcattccaattctcaaactcttacaaacacctaatgatattattcaaggggcaattgcttatttacgagtgatggctggtggtgtgacaattactttgatgtataatttgctatcatgtgttctacgggcttttgggaatagtaaaacaccattacttgcaatggtaattgcagcttcattaaatgtggggctggatctgttatttgtctgtgtttttcatttgggaatagctggagctgcgatcgcaacaatattagctcagctatttgccagcttattttgtttactggttttatataaacaaagcatttttagcttaaagtctgaacactttaaaattcagcggcatttaatttttgaattagtaaaattagggcttcctttagccttgcaaaacggaattatttcaattggtgggatgatcgttcaatttgtggtgaatggttatggagttatttttgtagccggctttactgcaacgaataaattatatggtttacttgaaacagctgctatttcttttggttatgctttaactacttataatgcgcaaaactatggagctcttgaatatcaacgggttcgagaaggtgttaatgcttcagcattaatatcacttgttacttcattaataatcgctcttattatgattgtttttggccgaaatattttaactttatttgtatcaggaagtcaaaatgaaattaatgcggttcttgaggttgcttatcactacttgtttattatggcggtctgcctaccgatcttatatatattacatacttatcgaaatgctttacagggattgggaaatacagttattccaatgttttctggaattgtagaattattgatgcgtgtaggaatagcacttttcttaccactgtttatggggcaggaaggaatttattatgcagaaattgttgcttggactggagctgctttattactgtatattagctataaacggactaaactgggggattgatgaatccggttttagttatcaaaaatgttgataaaaagaactatttttaaactagagaagtcatgctataatgggattaaggatggtgaaaattgtggtaaaagttgaagtggttccgtataatgaagattggcctcgtaagtatgcgctggaagcaaatgtgattcgcaatatcgttttagatgaattaattacaattacacatgttggttcaactgcagttcctggattagttgctaaaccgatcattgatattttgatcatcgttgaagacataaataaattagatcagttagatcctttatttaaaaaagaagactatgaatgttgtggggaggacgggatttcaggtcgacgtttttattataaaagcgatggttcaatccatgttcatgcatttgatgaaagaagtcatgataaaattgaattgctgatttctttttatgattatttaaaagataatcctgatattgctaaggagtatggtgaattgaagctttcattagctaaaaaatatcctgataatatcaaaaaatataaaaagggtaaagaagcttttacaaaagaaatacaaaccagagcgttaaaatggtatcgtcataaagatgtcgaacagatataaatagttcttaattccactaatcagcatattaattagtggaggtaataatatggataataataacagtattcgttttgaacacacaccttatcataatgtttatttaaaagaccgtaaaaatattgaattaacaggtgtgaaaaacattgaaagttttgattcgctagaatttttaattgaaacatcattaggttttttaaatattacggggaccgaattatcgttgacaaggttagaccaagaaaaatgtgaggttagtattaaaggcaacattgatgctatttcctatgtttcaaataaaaagaatcaaaaaggaaaagacagtgtttttaataaactgcttaaataatggacttagtaaaacaaattcaaggaattagttattcactggtttttggtttcactttcacttttatttacagtctcatcaatcgtttgttttataaataccacaaacgcatttttcgactcattttacagattgttattggtattatttttgggtatctctattatcttggtctgttagttattaataatggggtcgttcgaatatattttattattagtatggtaattggatatgttctctatcttaattattatagctattatatgttttttttgattgaaataattgtaagtatgttaaaatatcttttaagaccgataatattcatttttaggaaaataagtggtataataaaacgcatgaagagggtggtaaaatggctaaaagaaaagtttataaaaccgtcaaaggatttgcctacatgattataggctgcggcttgatgttgactttatttaatagcgccataactgtcttccagcgtcaagatgaaattgcggttttggaaaaggaaaagaaagcagtagaaaaagaaaaaaaagctttagaaaatgagatcagtttattgaatgatgatgattacgtagctcgttacgcacgtgaaaattatgttttcacgcgtgaaggtgaacaagtagcgatcattccgggcgtagaataaataagcactttgtgcttatttttattatttattggaggtaatttatgtttatagaagagaatatgtatatgagatcattgcgaagaaagcgtaaaatcacaatttatgtacctgatgattatgaaactagtaataagcgttatccggtcttgtacataaatgatggtcaaaatgctttttttgatgagacttcatatatgaaaattagttggggattttatgattatgttcaagcgcagaacttagatgttatcatggtggcgattccctgcaataaccgtttaaataaacgtgaagatgagtatggaccatggcgaattggtaaagaaattttaatgatggaatatggtgatgatagtttagaaattggtggtgaaggggacaagtatttacgctttattattaagcagttaaaaccttatattgatactcatttccctacgattgttgaagatagtgcgatggttggtagttcaatgggtggaatcattacaacttatgcaggattaaaatatccccatatttttaaaaagacggcatcgctatctagtgcatattggttttatatggatgaacttattgatttgatccatcggagtgatttaagtgctacgcaatgtttttatcttgatctaggtggtaatgaaggtaatggtgatgaagagatgagccgtatctactatgagagtaatgagacaatatacaatgagcttattaagaaaagtaatcggatcgaaggacggttctttgaagaagctggtcacaatgagtatgaatggcgtcaacgagtgccgatttttatggacctattttacaaataagaaaataattcgaggttttaataatttatgctattattaaagtattggaggatattttatgtataaattaatgttgtcagatttagatgagactttattggtaaagcatcacgtaccagaatttaatgttgaagcaatcaaagctgctcgtaaaaaaggattaaaatttgttccagctacagggcgggcttataatatgattccggagattttaaaggaaatcgatgcatatgatcaagaaggtgaatattcaatttgttttaatggggcattgattgtagaaaataaaaataatcgtatcttaaattttgagggaatatcgtttgaaacaactaaaatgctttttgaaaaggctcgagattttgatgtttgtgtacttattttcacaattgatatgtgttatatttataatgctgatcctgatgaggtacagcgtaaaacggatcaaaaggcaccgttcgttgttattgatgaatacaatatggatgacttgaaagatgaaaagatagcaaagattttgtatgaaaaaagagatatgccgtatttaaagtcgattgaagtggaagtcagtgaaatgattgaaggaaaagcttgtgctagttattcttcagggcgttatttagaatttaatgcgattggaattgataaaggttttgggttgcgctggctagctaattatttaggcatcgatattaatgaaacaattgcaattggtgataattataatgatgttgaaatgattaaagcggctaagttaggggtatgtgtaacatgtgcgactgatgacattaaggaattagcgcagtatgtcactgaagttgattatgatcaaggagcagtaaaagaagtaatagaaaaatttgtattggaggcagaataatgggatataaactaatagcatgtgatttagatgaaaccttattaaatgatgagcatttggttggagcgaaaaatgtcgcagcaatcaaaagagcccgagaagaatatggcgtgaaatttgttccagctacaggacgaggatttatgcaaattcaaccagagttaaaagaattacaattatatgaccttgagggtgaatatgtaatttcttttaatggtggagctttaacagaaaataaaaataatcgtattattgagttcaaaggtttagagtttagtaagatgaaagaaatttttgaagcaggattaaattttgatgtttgtatccatgtttatacgcctgataatttatatgtgtttaatttaagtgaatcggaacgccaaagaattaaaaatcaaaagttagaagcggtatatcctgaagttaatagtgttgattttttaaaggatacaccaatttctaagattttgtatcaaaatgttgatgttccttatttaatgagtttagaagaggggttaaaaccaattactgatggacattgtgcggttagttattcatcaaatcgttacatggaattcaatgctcttggggtggataaaggacaaggattgattgatttagcaaataaattaggcatcgctattgaagaaacgattgctgttggtgataattataatgatatggcaatgttaaaagtggcgggcttatcagtcgctgctaacaatgctgtagatgatgttaaagctgcatgtgattatacaacaaatgctaacaacaacgaaggtgttgtggcagaattgattgagaaatttatttttaatgagatttaaagatattgttgaaattgagtttcaacaagattattataagcagctacatcagtttgttgaaaatgaatatttacataaaacgatttttcccccaaaagaaaatatttttagagctttaaatctttgtgattatgaaaatgttaaagtagttattttaggacaagacccttatcatgaacttcatcaggcaaatggattggcattcagtgtttatccgggggttcggattcccccaagtttggttaatatttataaagagttacaagatgatttaggaacaatgattcctaatcatggagatctcacaaaatgggctaagcaaggagtcttgttgcttaataatgtgttaacagttgaagaagggcgggctaatagtcattctggtaaaggttgggaaacttttactttaaatattgttaaagctttaaataaacgccaaaagccgctagtatttattttatggggaaataatgcccgtgctaaaaaacaatatatcgacacttcacgtcatttggttttagagagtgcgcacccttctccactatcagcacatcggggattctttggttcacatccttttagtaaggcaaatgaatttttgattaggaatggaatgccaatgattgattggcaaattgataatatttaaaggttggtttatcagtaattatactgataaaggcaacctttttcttaagttttcttaatcgttataggattcattaaaaaaatatattaaatacgttataattaaaagtgaaaaaaggaggggactaaaatgaatagtggtattgggattatttgggcaccggttagtgctggaacattggttatttggggacttggaatatttgttgcagttgtaggaatggtgtggtttgttaaacggctcaaaaaaaagattcaattataagataaaagagggatttcgtaaaagaagtccttttattttgaatccttatttgtcattatagataaattgtattagaataagttaaattacttgcagaggagaaaataatgtttaatgatattaaaagtgcgctagtgtatatagagtcaaagcgaactaagcggaccttggaacagtttaaagagacaattaaaaaatatggctttaacatttaccaaaaaaatattattcatatagctggaactaatggtaaaggttcaacaactaattttattaaagatattatggttgaacatgggtatcgtgtgggaacatttacatcaccatatcttatttgtcataatgatcgtatttgtattaatggggaaatgataagtgatgaacgactgctgatgattattaacagtcttgttgaaattattgaaagcgaacaattatcgatgtttgaaattgatattttgatcatgttgcgttattttgatgaagaagaactagattatcgaattattgaaacaggaatcgggggattaaatgataaaactaatgtaattgatagtgtttgcagtgtgataactaatatcggttatgatcatcagtttatgttaggtgatactttagcacaaatagctcatcataaagctggaatcattaaacctgaacaaacttgttttactagcgaaataaataatgatttgattgatatttttaaagctgcagctgaaattaaaaatagtcaagtagttagtgtggagatagattgtgattatcgatatccttatcattttagctgtttaggttatgattaccagttaagtaattgtggtagttatcaggttgctaatgcgacattggcgattaatgtatgtgactatttgattgagttagatcattccttagtacaacgagctttagatggatttagctggccaggccgatttgaaaagtttggaaagatttatttagatggggcacataatatcgatggaatcaaggcactaattaagacattacatgatcaacaaataaaaaaggcattagttatcttcagtgctttgggggataaagatattgaacaaatggaagctttattaagtgaatatccattgattcaagcaacatttgcagatgaacggctacaattagagggaattgattttaaagaagcaattaaaaataatattgatctatatgatcatttaattattacaggctcgttacattttattagcacggtccgtaaatatcttcaaaataatttaattgaaaagcaggtatgattcaaatttacctgcctttttgtttgtcaacaataatagttacgatgacagtgattgcgaaggttgagatagcaccatataccgcctagcatcaaaactaagaagaaaaaactcccagcgagaattaggctaataacacttgtataagcataggcttcaatgataattgctaatagagaaattaggattaagccactactgccgagcgtagctagattaccgcaacaagtataagcgttatttggcggggttaaagcttcgctgattaagatactgacgagtccaaagataccgaggaatgcattgatgataaagaaaatctgattgatataaattgaactaccaaatattaaaaatatagcaattgcaacaataagtgcaaaactaatgattaataattgtttttttagacaattcattatttccctcctttctaatataacttatgcattcttgaaagagagataagatgaaaaagcatagaaaaagaagataaaatcttcttagtcaaaattacgattataccaagttagaaaaatatagacggtccaaatttttcgcgcattattgtgaattccttgataatgttcatcaagaagataatttaaatagtcacaattaaaatatttttgagcacttttactgttgaagagttctttaataggctgataatattgttcttctttgatccattcatttaagggaacagggaaaccaagtttttttcgttcactattttgaagaggaagggattttgctgccatttttcgaaaaatatacttagttgcttttttgttgacccgcaaatttgttggtaaaatggaactaatagcccatacttctttatctagatagggtactcgcacttcaagtgaattagccatggaaatatgatcagctttacgcaaaatatcgccccgtagccaaaagtttaaatcaatatactgcattttagtgatatcatctttttttgcaacatcacggtagtaagcatttgttaaaacttgtggtgggtatataggccattgtggtttaattagtttttttagctcatggttttgaaaaataaatgcatttccaataaatcgttcttctatcttttgtccagctcggattaaatattgtttacctttaaattcataattggtctttattaaaatatttttaagacctttacgaagaaagaaaggaattattttcgttggggctagggtcaggggggtttgatagatattataacctccgaataattcatcagcgccttctcctgataatactacttttacatgttgactagccaatttagttaaatgatagagtgggatgatcgaaggatcggcaactggttcatcaagaatatttaaaatagtagggatagtatgccaaaattcatctttggtaattactttttgatagttttcaatatctaaatattgagataattctcgggctaaagggagttcgttacaacgatgatcttcaaagccgacactaaaagtttttttacttggctgtttgctgctaagtaagaagaatcgatacctccagatagaaaagaacccatttcaacatctgctaggcgatggtggctgattgaatctttcagcgttgattcaagcatattgagggcatcggtttcttttaaattatcatcaagattataattgaatttaaagtaatgggttagttttagattatcagtaaattcaagataatgagctggtaagagttgaaagatgcctcggtaaaatgtttctgttaaaggattatattgaaaagctaaatagcttgaaaggcactgctcgttaaattttttttcaactccaggatattcaaacaatgctttgatctctgaagcaaaaactaattcatttttaacaattgtataaaataatggtttaattccaaaaatatcacgcgctataaaaagcgccttagtatgtatgttgtagatggcaaaagcaaacattcctcgtaaatgattaacaatatcattaccgtattcttcgtatccgtggatgattacttcgctatcgctattagtcgtgaaagtatgacctaaagagatgagttttgctcgtaagacttgatagttgtatatttcaccattaaaaacgagaatcaatgatttatcttcattaaataaaggctggttaccgctgtctaaatcaatgatacttaaacgtcgcatccctaatgtgattttactatcttgatagtatccttgatcatctggtccgcgatgactaattttttgtaacatattttcaataacgctttgattgttggaaacgttattagtatatccaataattccgcacatataaatacctccatggtggcattatatgctttaaataatagaaatgggtaaaagttaagctttattaaataatgctaagatagataagaaaaaattaagaataaataagaatcaataaggacttagtccttattgatatggatattgataattaagcgcttcatcaaattcagcccattcaagatagactaattgtaataagtagcgtttgccggttttgggatcgtgaagaataaaatgatctcgtcccgcctgttcaataatacctttaaagattctgtcccgccattcattgctgccggtatacgtaaagtaaaaggtacctaatttcccaacgttgatccgtaaaatattttcaacatatgcttgatcaataactggtgctggagttactgaaggtgtagaaggtgttcctggggtttggttaggggtaggggccggagctggcgttggggtagtatcaggggtttcagctggagctggatcctgccgtactaaataagggtttaagtcattaaaataatccataatcgatctcctcgtataattttttataaatcacaatttaattttaagcctgggttataaaaacagtgttgtttaaagcgaccggataaattgccatagaatttttctgggcaagcgacattggtaccgggatttttaaaccatagggcattagttgccggttcatttcgatagccgttaatacagcgtaatgcaatttgccgaagcagttcgttgactggttcgttaaagagtggggttccgaccccggaaaaagcattcttttggtagactacttcagtgatggttcgggtgtttcgaaaaacatcacagtttgcaacaacgcgattgataactacattaccaactaatagcataccttgttctccttcacctaaagcttcagatttaataagccgcgctagtaaatcgacttcttcggttgagtatttaattcgtgccaaattatcaccccgttataatatatgcagttatttataaaaaatgatagttgtttgaatttagggaaaattgcggggataaaaattatgatatcattttattaaaaaaataaatgagagtataatatatgacaagatacaataattatatttcgtataattaatctcgaatttatttctaatttatggtagaattaaattataggtaaagcgcttacattagacaaggaggtatttaaaaatgggaagagagattgtcgcaatgattttagctggtggacgtggaacacgtctagaagccctaacagctaaagtagctaaaccagcagtacactttggaggtaaatatcgtattattgactttcctttaagtaactgcgctaattcggggattgatattgttggggtgcttacgcaatatgaatctgtattgttaggtacttatgttggtgccggaactaaatggggacttgatggaaaacaatcactagctgcaattttaccggctcgtgaacgtggtgaagtaggagcaacctggtatgctggaacggctgatgctatttatcaaaacattagctttatcgatcaatatgatccagaatatgttttgattttatctggggaccatatttataaaatggattatgataaaatgcttacagctcataaacaacgtaaagctgatgccactatcgctgtattaaatgtatcattaaaagaagcaagccgttttggaatcatgaatacttatgaagatggaactatttatgaattcgatgaaaaaccagaaaaaccaaaatctacattagcatcaatggggatttatatctttacttataagcaattaagaaaatatttaattgcagatgccaaaaaagaagatagtaaacatgattttggaatgaacattattcctgacatgttaaatgataacaagaaattatatgcttatgaatttgatggatattggaaagatgttggaactgttgaaagcttatggcaggctaacatggacttgttaaaagataaagatcttgatttatataacatcaagaaagattggaagatctatactgaagatactttaggaaaaccacaaattatcggggatcaagctaaagttaaaaattctttgattacacaaggatgtttagttaatggtaatgttgaagaatcagttttattcaacaacgttaatgttggtgaaggggctaaagttattgattcagtattaatgccaggggtattagttgaagaaggcgctgaagtgtataaagcaattgttgatgaaggtgtagttattcgtgcaaaaactaagatcaacaaagaagctaaagaagtcgctttggttagtgataataagtaggggaggaaatagagatggtaaaagcaattggtatagttaatttacactcagatgtagattttgtcggtcttacagagagaagaccagtagcgtctgttagttttttaggacgttatgcattgattgatttcgtattatctaatatgtcaaattcaacaattgatgcagtcggagtattgattcaaaaaaaaccaagatcattatttaaacacttaggtaatggtgattcttggaactttaactctaaagctggtggggtttcattattatataatgaaaaatacgccaataaccctaattataatcatgatattaataatttaattgaaaatatcgcttttttagaagctaataaggctgattatgttgtgattgctccagcacatatcataacaacaatggattatgaagatgtaattgaaaatcacgaaaaaaccggtgctgaaattacaatggtatataagaaagttcatgatgctaatgaagcatatattggatgtgattgcttaacgatcaaagataaagttgtaacggctgtagaacgtaataagggtagtcgtaaagatcgtagtatttcattagaaacttatgtaattaatacaaaaactttattaaaagtaatgaagcaggcgcaaaaaatcagttcattctttagtttaaaagatgtactgggttatttatgtgatgaaaaacaaattaatgcttatgaatataaaggttatgcacgctgcattgattcattagaacattattataaatattcattagagttcttagatttagatgtgtcatcagcagtatttaaaagcaactggccgatttacacaatcacaaatgatacacctccagcaaaatatttaacagaatcagatgtaacaagatcatttgttgcaaatggagcaatgatcaatgggacggtggaaaatagcataattggacgtgatgtagtaattgggaccggtgcagtagtaaaaaattgtattctattctcaggttcagtggttaatccaggagcgcatctagaaaatgtaattatggataagacttctaaagtacaacggcaattgaatttaaaaggtgatgcaactacgccattgtatattaaagaaggagatgtggtttaatgcgagttttatttgcaacatctgaagcgacgccgtttatcaaatcgggtgggcttgcagatgtcctaggttctttaccaaaagagatggtaaagaaaggtgttgaaagtattgtagtgctgccaaagtatcaagatatgaaattggctgatgaaattgaatatgtcactagttttgatatttgggtaggatggcgaaaagtatattgtggtgtgtttacttatgaattagacggggtacgtttctattttattgataatgaacaatattttagaagacctggtttgtatggctatgatgatgattatgaaagatttgcatattttgattttgcagttcttgaattgatttctcatcttgatattaagccggatgttcttcatttgcatgattggcaaacagcgatgattgcgatgttatataaagaaagatattgttattatgaacattacgataatattaaaatcgtctttacaattcataatattgctttccagggaaaagctgaccctaaattgttaagtgagttatttggattagataattatttatactataatggtaattgtcgaaatgatggatgtttaaatatgatgaaagcagctattttctatagtgatattattacaactgtttcaccaacttatgcacgtgaaattttaactccagagtatggagaaggtttacaaaatatcttagaaatgcgaaaatatgatttgtatggtattttaaatggtgttgattatgatgtaattaatccagcaacagatcctcaaatcgttaaaaattatgatttagagacggtgtttaaagataaaattgtaaataaattagctttacaaaaagaagtgggattgcctgaagataaagatgttgcactaattgggatcgtgacacgattaactaaacaaaaaggattagatttaattatcaatcaatttagtgaaatgtgcagtcgtaaggttcaaatcttgattcttggtgccggtgatcaggtttatgaagatgccttaaaaggaatcgcatatcaccaccaagatactgtttcattacagttaaaatacgattttgggttatcttgtcgtatttatgcagggtgtgatatgttcttaatgccatcgttatttgaaccttgtgggttatcacagatgatgtctcttcgatatggaacgattccaatcgtaagggaaactggtggtttaaaagatagcgttgagccatatgatgaatatgctgatactggaactggatttagttttgcaaactataacgctcatgaaatgatgaaaacaattgactatgctttaaaggtttacgatgaagatcctgaggcatggaaaggaatcatgactagagcaatgcaggcaaagttagattgggatgctagcgctgaccaatatttaaaagtatttaattcgttaataggataaaagacagagcaatctgtcttttcctttccaaaggagaaggtatgataaaagcaattttttttgatgtagatggaacattgatttctaaaagcagatcagtgcttagtgagggtgtaatagcagctttaaaacagcttcaagaaaagggaatcaaattatttattgcaagtggacgtcactatttagaattagatgagttagggataaatgctcaatttacatttgatggttacctaacattgaacggagggtattgttttaatcaggaaggggttatttataaaaatcccattaattctaaagatgtagaaagaatcgttgatcatgtaactaaacatcagttggcttgtagttttgttgaaggagatgatttgtatattaatttaattaatgatctggttgttgctgcacagacggcaatcaatacctcattaccaccgaaaaaagatgtttcacgagccttgattaatgatgtttatcaaatcgatccttttgtaacaaaagaggagatagaagaactggtagctttaacgcaacattgcaaatatactcagtggcatgatggagcttatgatattattcccaagcaaggtgggaagcaagaaggaatcagtgctatcttggatcattataaaatcaaggttgaggaaacgatggcttttggtgatggacataatgatatagatatgctccagtttgttggtacgggaatttgtatggaaaatggctgtgcagaaacaaaggcagtgtgtgattacataacagataatgtcgacaatgatgggattgtgtcggctttacgatattttggcttattataaaataattgtgggctaaataaggttgtaatcggttggagagttgtgtaaaatgggatagtagaggagtggttgtaatgaaaaaaataatgaaaatacttgttacaactttatgcttgtgtcttgtgacagcttgtggcgcgcgggataaagatgttaacttagaaaaaagtggaactaagtatagtactgatgatggagttagtttttattatccaagtaattatgagattactgcaaatgcaactgatacagatacagtagaattctctaaggacaacaacacattgtattttaaagtaattaaagatgaaactgataatgttgttgaagataaagatgaattatatactggtgaaattgagcaaagtggtgcttcggagattgaggtatccaaaccggttttagacagtggtcttgatgtttatcaatatgtatttgttcatagtgatactggaattagagccaaagagatagtttactttagtgatgataatacttatatttatggatatcgtgctgctaaagatgattttgaggataacgataaagatatgacagtatatttgcagagtttttctatggcaacaggtaaataagttgtatttcgtgaatgattttgttaagataaacatatatttaaattataggtaaacgaagtagattattagaagttaatagagatagcctgatggtggaaacggctaaatggaaataattgaactgcccttatctgagtcttttgaaaagaaagaacgtgaactagcgttaatagtaatcttaaagcatctattatcgggtggaagaacacaatggtgtcctgatagtaatatgcttttttatttatggaggtaatgatgaaaatatttaacacccttacaaataagaaggaagaatttaaaccgcttcgcgaaggtgaagtaagtatttatgtatgtgggccaacggtttataattatgttcacattggtaatactcgcccgatgatcgtctttgatgtacttagaagaacatttgagtatttaggatataaagtgacttttgtatcaaactttactgatgttgatgataaaatcattaaggcggctaaggcagaaggaataactgaaaaagaacttactgataaatatattgctgcttatgaagatgttcgtcggaatttgaatttattattcccaacttatgcacctagagttacgaatacgatggatgcaatcataaaatttattgataatttagttaagagtggttatgcttatgaggttgacggggatgtttattttagagtatctaaaattgatgagtatggacaattatcagggatcaaaatcgaagatttagtagctggagcgagtgaacgaatcgatgaaaatgataaaaaagaagaatcaactgattttgcattatggaaaaagacggatgagggtattcgctttgatagtccatggtcaaaaggacgtcctggctggcatactgaatgtgtagttatgatcaacgatatttttgaaggtggtaagattgatattcacggtgggggacaggatttgaaattcccacatcatgaaaatgaaattgctcaatcaatggcttgtcatcatcatccgattgcacatacttggatgcataaccaaatgatcaatattgataatcaaaaaatgtctaaatcactaggaaatgttatttgggcaaaagatatggttgctgaattgggctgtaatgtagttaaatggtttatgttatcaagtcattatcgtaatccattaaatttaacggaagaagttttgaatagcgtgaaaaaagaagttgctaaagttgataatgtaatcaaatcagtttctttgtatttacaagttaatcatatcgctaatgaaaattataataaagcggcagttgatgggatggttggagctttagaagatgatttaaatacatcgctggctttaactaaaattcttgatcaagtaaaaaaattgaatctggctttccgtcaaaaagaaaagaatgataaagctatagcaattgaatatcaaacactattaaaaatgactgcagtgattggctttgtttttgaaccgcgtaaattaaatgcagcggaactagagatatatcaagcatggcttgaagctaaacaaaataaggattttgaaactgctgacaaattaagaactcaattaattgaaaaggggatcatttaatgcgcccggaattaatcaatgcaagtgtattagcttatctgggtgacagtatttttgaggtgctagtacgtgattatttagttaaagaaagtggttttgttaaaccgaacgatcttcagcgtgaagcagtaaaatatgtatcggcaagctcacatgctgcatttatgcatgatatgctggatgaagaattttttagtgctgatgaagttggaacttataaacggggacgcaataccaaagggagtaaaaatgaaagtcttgatcatatgcattcaacaggatttgaagcagtcattgggactttatacttagaagaaaactttgatcgaattaaagtgatctttgagcggtataaacaatatattaataataaataaaatcgagataaatttgagacgaaattaggtgaaaaatatgaaacaatatatatatggtaaaaacacaatattagaagctttaaagggagataagagtgtatatactgtgtatgtccaaaacaatgctaaagataatggcataattgagcaatgtaaaagaaaaaaaattccattcaagattgttgataagtctgaatttatcaagaaacttggaaatgttagtcatcagggagtgatggcggaaattgaagaatatcgctattatagtattgatgagatcatcaatactattcctgatggtaaacagccactattattaatgcttgacgggttagaagatccacataatctaggagcaattttaagaacttgtgatgctattggggttgatggtgttatcattgggaaaaatcgtagtgttggtttaaatgggacggttgcaaaggtttcaacgggtgctattgatcatgttaaggttgctcaagttacaaatttgactagaacattagaggatttaaaaaagcgttctttttgggttgttggctgtgatttagataaatcccaagattatcgtcaggttgattataatatgcctttggtaatagtaatcggttcagaaggttttggaatatcaagactagttaaaaaaagttgtgatatcaatgttgtcttgcccatggtagggcatgttaattcgttaaatgcttctgtggcaacagcagtgattttatatcaggtatataattctcgtaatcctttatagtaggaaggaggtaaccatgaatggttacgaaatcgaagaattgtattatttatatcgtcaggggtgtccgattgcacaggcacttttgattgaatattgctactggcaaattaagatgatgatgccggcgtattgttatacgatgacatcatatcagagtgattataaagattatcttcaagtagtaattattcgttgtttattggctttggataattatcgtcctgatcgtggcatgcaggttagaagttttatttcaatggtgatccaaaatacgattagttctttaattgtcaaaaaccaaggtaaagtagttagggaacggcaaactttattttctttggatgattattgtagtgatgatgagcgaatcagatatgtagatgcaatcgctgataataagagtccagatctactattaattgatcaagaacaacaaaagagggttgatgcgtatattttaaatgtttgctcggcttgggaacaaacggtaattgcttatcataagtgtggttttaaagaccaggatattgctttgaagcttaataaagacattagaagtatctataatgctaattatcggattcaaaaaaagatggaaaattcaaatctatttgactagtctgcatatttatgataaattataatagcgtagaaatgagctgattatatgaaacaaaaagttattttagtgtgtagtgagtgtttgtcacggaactacaccattacaaaaaacaaacgtgtaaatgtagaaagactggaattaaacaaatactgtaaaaaatgcgggaagcataccttgcataaggaaacgaaataggaggactaagtgtgaaatttcgcgattggtttagtttaaaagggattagaaaagaaattaaaaatgtcagttggttatcaaaaaaagaactagctcaaaattcagcaatagtactactattttgctttgtaatggggttatatttctttgccggtgacgcaattattgcatttattttaaagacattggggatgaactaaaatgacaggaatgaatgatgaaggaagacaatggtatgttgttaatacatactctggtcatgaaaataaagtaaaagaaaacttggaaaaacgtgttgaatcaatgggattacaagatatcctatttcaaattgttattcctgaacatgttgaaactgaaattaaagatggtaagaaaatcaataagactaaaaacatgttcccaggttatgtattagttgagatgatcatgactgatgaagcatggtatgttgtccgtaatacttctggggttacaggatttattggatcatcaggtggtggagcaaaacctttcccattacaaaaaagtgagttagatccaattttaaagaaaatgggattaagtacatcaagtattgaggttgattatgctgcaggtgatgaagttaatgtcatctctggaccatttgctggtaaaagtggtaaggttgaatcaattgatttagaaaaagaaactgctaaagtattagtggacttcttaggcaacttaacaccaatggaaattgaattagtacaattagaaaaagcagatttgtagaatttatctacaaatctttttttatgagtaagtaaaacaaataatttattttacttaaaaatgtcgattattgcgactaaatttactgaaaaatagttgacgtggacttataaagtggtatactaaaatagaaataggattgttactttaagtaggcaagaccaagaatcatacagttttttactgttgatttttggtcttttgtttttatttagtaatgatacgggaaaatgaggagaaacgggtatggagaaaacgaaagtaaaaaaactagtgacttcagcaattacactatcaatggcatttagtacattggcgccaagtatggtttttgcaactgatgatgtaaaacctcgtgatattgtaactaaagtcaatcatgcgttgaatgggacagcaacggcaaacaatagcgagacaagttattgggggccagataaagcaattgatggaatcgtaaatcgcgatgctgctaaacctgatcagtcacgctggtcaacgaatatgggaacaacaccgatggttttaaccattgatttaaaggaagaaaaagcgtttagtgaatttaaaattgaatgggaaagaaaaaatattaaaggttttaatattagtatttctaatgataataatgaatatacaccagtatatactaaaccagatgatagcaatatcacttcgttaactacaacagtaacattagaaaatagtgtgagtgcacgttatgttaaattaacagtagataattatgatgatactgaggcagctggctgggcttctgtatcgctatatgaatttgaagttttaggtgaggaatcttatgaaaatttagctgttggggcaacggctgtagctagtggttctgaaacaactagttttggcccagctaacgttgttgatgaaaatatgaaaacacgttgggcaagtacggctaatcatgatgatgataaatggattagtttagattttggaactgctaaagatattgcttcagtcactttgaaatgggaacgccgtaatgcaacaaagtacaaaattcaatcgtcaaaaaatgggacaagctgggaagatgtaaaaacacttactaaagcacctagagaatttgatgatattattaattttgacaatacgattaatactcgttatttaagagttgttgtttcagattttgaaaatctagcggaagatcgagatggtaagagtgttaattggcctacagtatcattatatgaattcgaagcatatgcagttaaacaacaggtagatagcgaacagattgtaacgattgatgatgtaattaataatctagtaattccagcggtagctaaaggagatacaaagatggctttgccccaagttcccgagggatttgaaattgagtttattggtgctgattatgaacaaatcttagatcgtgatttaacgattcatcagccaattgtggatacaatagtatctgtaaattataaagtaaaaaaaggtgatcaagaaaagatcacaggtgcatataatgtcacgattccaggaaaaaatagtcctgatgtcagcattaatgctaagcctaaagtagttccagaattagctgaatgggtaggaacagaaggaagctttacaattagcgatgattctcggattgtgatcaatccagcttataaagatgatttagcatatttagctaaaacatttaaggctgattatcaagcacaaactggtaaagaaattgaagtagtatatgccaatacaccaggggcgcatgatttctattttacattaggaagtagtgataccgggttaaaagaagaaggttatttaatgactgttggagatagtgttaaagttgaagcagtcgacaaaacaggggctttctgggcaacacaatcaattttacaaattttaaagcaaaatagtaatacgatccctaatgggcaaactcgtgattaccctaaatatgaagttcggggattcatgctggatgttggaagaatgccatattcattagatatattaaaagatattgcaaaaaatatggcttattataaaatgaatgatttccaagtacatttaaatgataactatatttgggttgaagattatggtgataatgcttttgatgcttattctgggtttagactagaatcagatataaaagcgggtggtaatggtggattaaatcaagctgatctaactagcaaagatgttttttatacaaaagatcagttccggacatttatccaagaatgtcgggatatgggggtagcggttgttcctgaatttgatacgccagctcattctctagctttaacgaaggttcgtccagacttagcgatgaaagataaatctgtagcacgtcactgggatcatttggatctagatagtatgtatgatgagagtttagcttttactcaatcaatttttaatgaatatatgaatggtgatgatccggtttttgatcaaaatacaacagttaatgtaggtactgatgaatatgatggtaagtacgcagaaaacttccgtcaatatactgatgatatgttaaaatttattcaagatacaggacgcgatgttcgtttgtggggaagtttatcaatgcgcaaaggttctacaccagttcgttctgaaaatgtgcaaatgaacatttggaatacaagttgggctaaccccaatgaaatgtataaacaaggttttgatttaattaatatggttgatggaactttatatatggtgccgggggcaggttattataacgattatttaaatagtcaaaatatttataataactggcagcctaataatatgggtggaacgatcattccggccggagatgagcaaatgttaggttctgcatatgcaatttggaatgatatggttgataaaaaggcgaatggtataagtgaatatgatatttatgatcgttttgaaaaagctttaccggcaatgtcatctaaattatggggcgatggtcaagatttaaaatataatgaattaaatgaagtagttaattcattaggaactgccccaaattcaaatccgcgtgatgttgtaacgagcaaaagcgatacagtattaaactatgattttaataagagtgaaatcgttgataaatcaggaaacgagtataatgtcgttaataaaaagaatgttgcgactgtagcaggaaaattttctaaaggcctagaattaagtggtggtgaaagttatattgaaacaccattagcagatatgggaccgaataacagtgtatctttctgggtgaaaatggataaagacgcaactggtgaacaagttttatttgaatcagataagggttcaattaaaatgtcacaaaaagatactggaaaagtaggcttctcaagaatcggttatgattattcatttaattatgaattacctaaagacgaatgggtaaaattagaaataaagggatatgctaataaggccgaattgtatgttaatggtgaattagtagatactttagctaaaaatgcaactggtggtaaatacgcaacgttaactttaccattagaaagaattggaagtaagacaacatcattcaaggggattattgataatttagagatttcaactactggtagtcaaagtgatgacactgattatacaaaggtagatagcagtaactttactgtatctacagataatgaaaatcctcaagcaggtaatgaaggaccgattacttatgcatttgataacaatgaggttactttctggcatagtaattattccccatatcaagctttaccagcaactgtagagattgatatgaaagaagttcatactattaatcaatttgattatctaccacgacaagatggtaataccaatgggcaaattactaaatatgaattatatattaaagaaaatgcggcagatgaatatcaaaaggtttctgaaggagaattggctgccaatgcttcgttaaagaaaattacttttgatgcagcgaatgctcgatatattaaatttgtagcgttagaaggtactggaaatggcggaaaatcatttgcttgtgcttcggaatttactgtacgtcaaattgactctaaggcagaattaagaaaagtagtcaacttagcagctaattatgaaaaggaatattatacaactgcttcatggaatgattttgaaacagcattaactaatgctcaaatgattctcgataaagcagatgcttcatcaacagagattgatgacgctgcgagtgctttaaaaacagcgattgatagtctggttgaaattggtgatgtggttaaaacagagcttgaaagagttattgctgaagcacaatctatcgatactacaaaatataccgataaaacagtagatgttttaaaaacagcattagtaaatgcaattagtatcaatggtaatgaaaatgctactcaagaagaagtaaatgcagcaattacagcattaactaatgcaattgatgaattagaactaaaaacagatgtatcagttgataaaacagatttagaagctttattaaatatttgtggtacaattgatttgaataattaccaagaaaatggtaaagctgaatttaaggcggcttacgagtatgctttatcgatctttaatgaagctgatgctacagaacaagaaattagggatgcaatgaataggctgttggaagctaaaaagaatttaaaggaaattgaagtaactccaactgatcctgacaaaaatggtcaagataaacctattgacaataaagttgaaacgggagataatataaatgtgctttattctgcgtcaggattagcattggcatcaattgtgttttatttcagtaaaaaaagaaaaagatctaattaaaaataattaaagatagggggagagctaacgctgtccctctttgtgtataatttagaaaattaggtttgataatatagcagtttgatcccgttctttaaaatatttcaaaatatgaaaaaaaggagtttgattaattgattaggggcaaaaaaattgaaaaaattaaggaatcatggggattttagatggtttcatatattaaacttcttctttaataattagaatttgtatgatggaatcaagaaaatttgcatttttaattcagatatgttattatgcaatggtacgttttagataggaagtgagttaatgaaagaacagcgtgttaaacaattgaataattttattaatgaaaatattatcaaacggaaagctatgtttatcccaatcttaggggtatcagtatttatgttagtaggttatgccgcggtcgataaagaagcaccaaaaattgtttctaatcgaatcgaggtttcatatggtgacaaagtagatttagatgctattgatattacagataatcaagatagtcgtccggaaatcgaagttactgcaaatgatcttagcagcgtgaatgttaatcagttaggtacatatgatttatcagtcacggcaacagatagtttttcaaacacagcatctaaagttattaaagtagatgttgttgatgatgaggcaccaaaatttaaggttgctggagtcgaaacagggtatgtcgtacaagtaccgatcaatggaagtcaagatatttccagttatgtaactgcttcagataatgttgatggtgatgtttcgccattcattgaatcgaatcaggaattagatacgactaaagcgggaattcaagatattaaattatcagttaccgattcttctgggaatgtaaatgaaaagacgtttacttttgcagtatctgatttgactgctccagtagttactttatcacaaggaaatgatattgtaattgattatggtagcgaatttaaattagagaactttttaacagctactgatgatcaaagtgctgttaccaacactgttactggtgaagtagacactaagaaagaaaatgaagtacaaacaattactgttagtacgcaagatgaagctaaaaatgaagttttaacaactttgaattttacagtaaaagatataagtggaccacaagttaatttgtcaacaaatgcagttgaggtaattaaaggtgatgcttttgatccaagacaatatttagtctcagctattgataataaagatggtgatgtgactggtaatgttgtaatcggtaatattgatactggcagcacaggagataaagctgttacttatacagtaagtgatagttctggtaatcaaacagttgcaactttaaatgtaaaggtttatacaccgggaagtaaaattttagaaactgcttatacaaaactaggtagcccatacgtatggggagccacgggaccaaattcatttgactgttcaggatttacatcttgggtatatcgtcagcatggaatttccctttcaagaactgcgcaagctcaatctcaaggtggtaaagcagttgatcgtgcagatttacaaccaggagatttagtcttctttggttcaagtacaagtagaattactcacgttggaatttatgttggaaatggacaaatggttcattcaccacaaactggagatgttgtaaaagtgtctagtttaaatcgtaattacgtgtgtgcaagaagatatttatagaaaagggcgtttgtccttttcttttttttatatttaggcataagaatataggggaggtatataatgaatagttttgatcttattagggtattatgtaatactagtcctaaagcttatgctttaattacaggagcaacagttacgggaacaatgctagcatatagttttgaagaaggaacgatcgttgtggttgaggctcaagggttaccggctaccggttgtggtttaggggtacatggtttgcatattcatgaaggttctagctgtagtgggacaccggaaaatccttttggtaatgctggaggacattatagtacgacaaattgtccacatccatatcatactggggatctgccacctttattttctgaggacggacaagcttggatggcggtatatatttctaaatttacaccagagcaaattgttgggcggactattataattcatggaaatgttgatgattttactactcagccatcgggaaattctgggccgatgattgcttgtggtgtgattagggaattatatcaataatatttacttttcttaagttaaaaaacaatctaactatggtacaatatagtggcggaggtatgaagatgagtaaattattattttttgatatcgatggaacactgattgagtgtaatttagatatctattcaattactgaaaatactagaaatgcattagatagattaaaagaaaatggacatgatgttttcttagctacaggacggtgtaaatgttttattactgaaggggttatgaattatccttttagtgggtatgtgacttgtaacggagcttatgtagaatatcatggtgagccagtatataaagcaataattcctagtgaggcaattaaagcaacgatggcgttatcagaacaatacgattttaactattattttgaaagtagtgattatatctatgtccgtgatcaaaatgatgaacgtcatcagtggtttgcaaaaaattggggcatgaaaccggagacagttattgatgattttgatccagaaacgatagaaacttacattgggatgattgttgttaatgacaaaaaagatatttcgccaatggttaatgcattgagtaaatattttgatgtccaaagacatcaaagtgattattcttttgatttaactttaaagggtgtctcaaaagcagttggaattgaaaaactggtagaacgaattaatcgaaatattgatgacactattgcttttggtgatggacgaaatgatattgagatgttggaaacagttaagattggtgtagcaatgggaaatgctgttgatgaggcgaaggctgttgctaactatgaaactgatcgaatcgaaaatgatggcattgttaaagctttaaaacattttgaattaatttgacagccttagggctgtttttcagttagttctttattaaacgggtatacttaaagatgtctacaacattcgcttgaaagaagggatgattgtgctatactttaaccatagtgtttttagatttgagaaaggagataggtgttagtgccttgttagatatgatcttacaattattttgtttaatagctggttttgtcttattgattaaaggagctgatatttttgttgagggagcttctaagctggcttcaaagctaaatattcccccaattgtaataggtttgacgatcgttgcttttggtacaagcgctccggaagctgctatttctattacttcggcgttaggcggtaatgttgatttagcagttggaaatattattggcagtaatataatgaatgttttgttgattctaggaattaccgggtgtatcgctaaactgaaggttaataataatacatatcgatatgaaattccttttgtaatggtaataactctagttttattaatgttaggaaagtttggcagctcgattgatcgatttgatggagtgcttttatggggattatttttactgtttttatactatttatatcgtttggttaaaaagggtgaagaagtgccattggatgaagttgaagaattagatgaaaaagatacgctgctccgactaatcatcatgattgttttaggaatggcggcaattgtaattggtagtaatctaacgattgatgcagctacatatattgctgaagaattaggggttagtcaacgtttgattggattgacgattattgcttttggaacatcgttgccggagttagtgacttcaatgacagcagcttggaaaggtaagagtgatctggcaattggtaatatcgtcggaagtaatatttttaatatcttgtttgttttaggaacaacagctttaatttccccaaaagcagttgcttttgaaagtggttttattattgatggaatcgttgcaattggggcattgtttctattatatacttttattggtagcgatgggtatttaaaaaagagtggggcaattattatgctgattggctatttggcatattttgtaagcattttataggagaaatatatgattaaattaggtcatcggggatatagttctaaatatccagaaaatacaatgttagcttttaaagctgcaattgatggtaattttgatggtgttgaaacagatgtacaactaacgaaagataataggctagtcttgattcatgatgaaaagattgatcggacttctaatggtaaagggtatgtaaaagattatacctatgatcaattgtgccaatttaattttaactatcgttttgatggaatcgaggcaaaaattccgttgttagaggaattgttagattattgtattggtaaagatgtaatcttaaatattgaaataaaaactgataagattcagtatccgaatattgaaagaatgacttatatgatgatcaaagaaaagggcttattagatcgagtaatgttttcatcgtttcatttagagagtttgcttaatcttagagaacttgatgatagtatttatcttggctatttgtatgaagataattatcaagtcaataaagctaaagtatttgaatatcgttttaatggagcacatcctaaatatacttttttaaatgaaaaggaaatcaatgattatttgcgtcggggtatagatgtaaatacttggacagtagatagtgatgatattaaagattttttagttgatgagggtgttaaaacaataattacgaataaagatatctagggtaaaaagaccctagattttttctcatccagtaaattaagcagtgatacaagtgttagcgttttcattgtaaagttagtgtttttgttgtgaaaaaatgcacaatattacttgtgttttttgcaaatttggggtacactatcggtggaaacaaattaaatatttcacaatgaatcggaggaagaaataatggcagaaaaaaaagctgttaacaaagtagttgaaccaactaatgaagaaatcgatgctcatgttgatcaactagttgcaaaagctcaagtagctttatcaaaatttgaagaattcactcaagaacaagtagattacatcgtagctaaatgttcagttgctggacttgatgctcatggtacattagctgaagctgcagttaatgaaactggacgtggtgtatttgaagataaagcagttaaaaacttatttgcttgtgaatatgtaacaagtaacttacgtcacttaaaaactgttggtatcatcaatgaagatccacttttaggaatcactgaaattgctgaaccagtaggtgttgtttgtggtatcgttccaacaactaacccaacttctacagtaattttcaaatcattaatttgtttaaaaacaagaaacccaattatcttctcattccatccaagtgctcatgcatgttcagtaatggctgctgtagtaattagagatgctgcaatcgctgctggggctccagaagattgtatccaatggttagatcttaaatcaatgtatgcaactactgcattaatgaaacacccaggtgttgctacaatcttagcaactggtggtaacgcaatggtagctgctgcttactcttgtggtaaacctgcattaggtgtaggagctggtaacgttcctgcttatgtagaaaaaacttgtgtattacctagagctgtaaatgacatcgtattatcaaaatctttcgataacggtatgatctgtgcttctgaacaagctgctatcgttgatactgaaatctatgatgcattcatgaaagaaatcaaaagattcaaagtttactttgtaaataaagaagaaaaagcaaaattagaaacatttatgtttggtgctgtagcatacagtgataacgtaaacgctgctaagttaaatccaaacgtagttggtaaacctgctacttggatcgctgaacaagctggattcaaagtaccagaagatactcaaattatctgtgcagaatgtaaagaagttggtccaaatgaaccattaacaagagaaaaattatctccagtattagctgtattaaaagctaaaaatactgatgatggtatcttgaaagcaactcaaatggttgaattcaatggtttgggtcactctgctgcaattcatacagaagatcatgaaatttctaagaaattcggacatgcatgtaaagcaatccgtattatcgaaaacgctccatctacattcggtggtattggttctgtttataatgcatttattccatcattaacattaggttgtggttcttacggacataactctgtatcaaacaacgtaagtgctgttaacttaatcaatattaagagaatcgggagacgtaataacaatatgcaatgggttaaacttcctccaaaaatttatttcgaaagaaattcgattaaatatttaagagacatgaaaaaaatggaaaaagccatgatcgttacagatagaggtatgtacaatcttggttatgtagaaaaaatcgaagatgttattagaagaagaagaaatcaagttgatttagaattattctttgacgtagaaccagatccaagtttcgatacagttcaagctggtcttgaattaatgaacaaattccaacctgatacaattatcgcattaggtgggggttcttcaatggatgctgctaaagtaatgtggttattatatgaaaatccagaagtatgtttcgatgatatcaaacaaaaattcatggatatcagaaaacgtgcattcaaattccctgaattaggtaaaaaagctaacttaatctgtattcctacaacttcaggaacaggttcagaagttactccattctcagttattacagataaatcttgtaacaagaaatatccattaactgactatgctttaactccaacagtagctatcgttgaccctgaattcgttatgtctttaccagctgcaattgctgctgatacaggtatcgacgtattaactcatgcagttgaagcttacgtatctatcttagcttctgactttactgatggatgggctaaacaagccgttaaattagtatttgattacttagaagaatcagttaaagaaggaactcctttatctagagaaaaaatgcacaatgctgcaacaatcgcaggtatggctttcgctaatgcattcttaggtatgaaccactcattagctcataaaattggtggggaattccacgtacctcatggacgtactaatggtatcttattaccacacgttatcagatataacggaagtatgccaactaaattaaacatctggccaaaaattgaaaacttcaaagctgatgttaaatatatggaattagctcaattaatcggattaaatcctaaaactcctgcagaaggtgttcaaatgtttgctgacgcttgtgaagaattatgtcacaaagttaatttagcatctaacatcgaatctcaaggaatcgataaaaaagattgggatgaagcaattcacagaatggctatgaatgcttatgaagatcaatgtactccagcaaatccaagaatgcctatggtacatgatatggaagcaatcttaagaactatttgggattataaaaataaattcgataaataataatgtttatctttgaggcaacaccaagtgttgcctcttttttattagacactttgtgttataatgggcatatattaaagtatcggggtgtgatttaatgcgacgtaatatttataattcaatatattattgtgttttagggttgattttaattgttatttcatcaatggcaattattcagcgagaagattttttaatgcgtgtatttgacgtattggcatggattttgattattaatggtcttcatgaattaagtgtatttttaagacgtcgctttagaggagatttaattaatataattggaaatattggagtaggaatatttattttgtcttatacagcgattccaattagattattatttgctatttttgcaatctatataacattaaatggaattataaaatttatttcttatttaaactataaaaaagataaagtgagtaaacgatttccagttttgtgtggggctctgtttttgatcatctatggcttggcactgttattagggagatatgctgatgctaatgcaatgatgatcttcattggcggttatggcttattactaggaataaattacattattgatggaatctttaccgctattccccagcagcataaagacagtttaaagagacggatcagaatacccgtaccaatctttatttctgcccttgtaccaaaagtgatgatggattatataaatgaacggttagcagttgagccaacagagaagtttttagacgatcagaatcacgcaaatgtagaaatttttattcatgttagcccagatggatttgggacaattggacattgcgatatatgtatcgataatcaagtaatatcttatggaaactatgattacgattctattagattatttgaaaccattggggatggtgttttgtttattgctccacgagaaagttatattccattttgcatcgaaactgatcataaaacgatttttagttatggggttcgtttaacagttaaacagttagcgagtgtaaaacgagaaattgaaaagttaaaagaaaatacctacccttggtatccgcgttcatataaagataggaatgattgtaatgactatgccagccgtctttatttacgaacgggagctagcttttttaaatttaaaagaggacgctataaaacatattttgttttagggtctaattgtgttaagttagctgaagcaattatgggaaaagcaggaatggatattattgatttaaatggaattatttctccgggtacttatcaaaactatttagagaaggaatatcaaagggcaaatggtgttattatttcaaaaaatgtttataaccaattgacaattgaccataaatgagacataataatggagtattatggttatgtcaaagaaagacaataatactttgcataggtgacccctctcccatataatcacctatgcagaaaaggaacaagaaattgttcctttttttatacattttttttaaaagttcataaagtgttcacatttctccgatattattacaaatgtcgtcaagacaagataatatataagtataggtcacccccttcttccccaagaacgacctatacattaaaggaagtattccccaatgcttccttttttttatttgttagtgcaaaaaaattcttgcttagataataaaaatttgctagaatgtaaaagggcaacagtgtgtcttccagaggaagacatttttattttgatataaaacaaaaaggagaatagaaaatggcaaagtatatatttgtaacaggtggggtcgtatcaggccttggtaaaggtttaactgctgcatcgttaggtcgaattttaaaacagcgagggttaaaagtgtttatgcaaaaattagatccttatatcaatgttgatccaggaacgatgtcaccatatcagcatggtgaggtttttgtaacggcagatggtgctgaaaccgatttagatttggggcattatgaaaggttcattgatgaagaattaaatcgtaattcatctattactacaggacgaatttatagtaatgttatatctaaagaacgtcgaggggattatctaggagctacggtacaagtggtaccgcatattacaaatgaaataaaagcaaaaatttatgctgcagcatcaagttctaatgcagatattgtaattactgaaattggaggaacgactggagatattgaaagtttaccgtttttagaagcaattagacaggtacgcttagatttaggttatgataatactctttatattcatacgacactattaccttatattggagcgagtcatgaggttaaaactaaaccaacacagcatagtgttaaggagctaagaggtttagggattcagccagattttattgtatgtcgaagtgagaagtatattgaacaagagcttaaagataaaatttcattattctgtaatgttccaacaaaaaacgtaatttcaaattatgatgttgaagtattatatgaattgccaatgatgttattggatcagcatatggatgatcttgtccttgaacatctaagaattgaggccccacaaccaaatatgagtgagtgggagagtttgattgaacgggttaaaggtttagatcatgaaataacaattgctttggtaggaaagtatactcaattaccagatgcttatttgtcagtaaatgaagctttaagacatgcgggatattatgaaaatagtgttgtaaatattgaatttgttgattctgaggaaataacaaaagataatgtcgctgaaaagttaaaaacagcagatggaatcatagttcctggaggatttggtaaccgcggaattgaaggaatgatagatgcaattgaatatgcacgaatcaataacttaccattttttggaatttgtttagggatgcagctggcaacgattgaatacgcccgtaatgtttgcggcttgaaagatgctaattcattagaatttgatgaactaacaaaaaatcctattattaatttaatgtctgatcaatcattaactgatatgggtggaactcaacgcttaggtgattataattgtgaactggctgccggtacacatgctagagaattatatggggtcgatatgattcaagaacgtcatcgtcatcgctatgaatttaataatgagtataaagacgctttagttgaacatggacttacgattgcaggcattaatcctgaacgtaatttggtagaaatagtggaaattaaggaacatccatattttgtggcttgccaatttcatccagaatttacaagtcgaccaaatcgttctcaaccgctatttcagggtttgattacagccgctcataagcgaaaatatcatgggtaggtattgcacctatcctttttatatagtaccgtaatatgatacttagtgaataaatagtaactttagtcctaaatcaagatacaaactcccctaattagtcattatcattgtattcgcttacaactataataattgatataggaggaagtaaaatgagaaaaataaaaaaactatttgcaatgatgatgacattagtaatgaccctaggcattattacaacaaatattagtgcaatcgaggaattaaaagttacttcaattgttgctaatacatatgttggggatggacaaagagaagtgagttcatttgaaatcactgtcaatgatattaatttagtaaatgatttaaaggctgaagattttgatattactaataacgttagctcagtaccctacgacgttgcgacaaatgctttagcagatgattatttagatgatggaattagtttagaaattaaaggaaatacaattattcttaatgtaaaagcctttgattatactggacgatacaatcctgattttagtaaaaatccttggcaggttacctgcaacaaatatggtgtgttaagtttcaataaagataatgtgactacattgaaaacaaaaactttggatgatgcaatcagaggaacgtttacatatgcgggattaactcgtgagtatgctttatatttgcctaaaaatagtgatggaactaacatgaaaaatgttccattagtagtatggaatcatggtggtggagaatatgcagggcaattagaaaatacacttgttgctaatagaggtttaactgcatgggtagaggcaggatataatacagcggtattacaaattcaagtttctaatccaaactatagctacgggacagcttttgatgaagataagaaatctttgatcgatcaaaataacgctttacaagcagcgttaataaaaaaattaattgcagaaggaacagttgatcaaaatcgtgtttatgttacaggagcatcaagtggtggtggcgcaacgatgcgctttattatgcaatacccagaactttttgcgggtgcgatagcttgttgttcaatggatccgattgtgtgggtacattataattatcaagattcttatgaacaaattgttgaaaattttgaaactgctttccaaggacaagtatacacttgggatgaaacaaaagaaatgatggtaagcaaacaagttgatactgcttctttagtagagttaccaatttattttacacatgctcaaaatgatactacatgcaatgttaatagttcaaaagctatgtatgaagctttaaataatctaggtgctaaaaataatcacttaacaatctggtcaaatcaagaaatgactgacgaaggaattgctgaaggtttattacattggtcgtgggtaaaagtacttaaccataatgaagaaggttcaccaatgaattggttatttaaacagacaaatgcttcagaaaatattccagtagaaaaagaagagtcgaataattctaaaactgaaacaactgcttctgaggaagcaaagaaagcagttaaaacaggtgatgatagtacagttgaattgatggctatgatgactggattatcattgttagcgggaacagtagtattaagtaaaaaatattattaataataaaaatcctctaactgaaatgaacctcattatttgaacgttcaaataatggaagattatttcaaatgaggattttttatttaaaattcgagtaatttcaccaaaaaattaatgaaatatagtatactaatacccagaggtgaaagcgctatgataaaaaatataactttattagatagtattttggatgttgctaactgtgtcgatattaatgataataatacctatattgctcggaaagtgatagagaattgtgtttggttaaaggatatgagtttagaggatttcttagaaacaactaatattaatgggagtcagtttaaacgattttataaattgtatgactgcaacaatttttcaatcttgaaagagcggattggcttgtggtgtgatattcgtaaagagcaagtagtaaaacagtgtcagtggcaaaaacaagaaccgcttgcaagagttatttttaacttaactaattataatgattttaatgatttttttaatgttgagttaattgatcggatttgcaagcaaatctatcaaagtaagcgtattatcatgtatggggcgatgggattgttgaatttaacacatgattttcaaatagatatgaaactgtttggaaaggattttattcgtagttcgatgtatgaagataaggctctagttcctcaaaaagatgattttgtatggcttttttcaatgatgggaagaacgatgaatatggtagggacaacaatgcgtttaaaaatcttaaatggtccttgtaagaagttattaattactcaacacggggcattattagagagtgattttttaatttcattaaatactgataatgattattatgaggggcagtatgtttttatgttttatctagatatgattaaaacaagatattatgaattatatataaaggagaactaggcagatgattttggggaaggttatgatggctcaaagtgctaataagcgtgggagtgtagaatatcagatcagtaaaaaaacattgatgctcggaaatcgaatcaaagattattcattagaaatgtttattaaagaagctggggtatcaaaaacatcattgatgcggtatttaaatagcctgggggttaatacctttacttcttttagggaaataatcacattagagagtattaaaggcatcacagccttggaaacaataaaatataactataaggaagaacagctagacaaacaggctgttaaattaggaaaaataattaaagaggctaaacgtgttattgttttgggggatggtaattgttttagtttgatgatttatatgaaagcctttattcatctagggatagattttgaaattcctatttatttaggtaaggaggaggatatttttgatgaatatgcattatctaaagatgatctggtaatttttatcagtcttcatgaaacgtttagaagttttttagatcatcgaacgatgttttataaggatgttagatattttcaattcaattgtccgtgtcgagttgcatttgtgggagaagtagatttaggacaagaaccactaagtgaataccagtttatcgtagatattgatgggcttatatatgaacgtaaaatgcgtttagataagttatttgaagaggcaatgagttatttatgtcttagttatgaatttgtttattaattcttaagtttttattgatgggaatttttgtttgtttttgttataatacagtatattatggaggcggtaatatgcttgaaactaaatcaactaagaaatttaagataattaaaggaataatttgtattcttactttagcaatgctagtggcagcagtgatttttttattcattgttgatgatatgaaaaagaagcgacgtctgattttttcaattgttcaattattgttaatgataggaattataattttaccagaacagttaaaggaacgacttgatttaaaaattccgattatgttagaaacctcactaactgtatttgctttttgtggatttgtacttggtgatgtgtttgatttttataaaaaaatacctatttgggactcaatactacatgctttttcaggtgtgatcttagcttatgcaggttttgttttaattgattattttgttaaacgtgaaagtgtaaatatatcgatgggacatatgtttatttgcactagtgtagtattgttctcgttagcattgggtgctttatgggaaattggagagtatttggttgatgatatttttgggactaataatcagcagtatatgaagtctacgcgaggaactttatatggccaaaaagatgtgcctttagaaggacatgcagctttaggcgatacgatgaaagatttaatgttagacttagctggagcaacagctattgtaacaatagaatactgtaaagaggattatcgcaaaaagaaagctaagaaagaagataagtaaactttgagcattgaaaatgccctagaatatagggcgtttttgtgttagaatatggcgtggaggagtgagagtatgtatcgaattggacaatcaattgatattcatcagctagtagcaggacgaaagttgattttgggtggtgttgaaatcgaacatgagcgtggtttgttaggacatagtgatgctgatgttttatgtcatgccgttattgaaagtattattggggctttaggattaggtgatattgggaaacattttagtgacactgatgctcagtataaagggattagttctttagtgctattagaaaaaacttatgaaatgatggatgatcgcggttacgaaataagtaatcttgatgcaatcattttgattgaaaaaccaaagatggcacctcatatccaaaaaatgaaggaaaatattagcaggatcttaaaatgtgatattgctgatgttaatattaaagcaacccgtggtgagaagcttggctttgttggtcatgaagaaggtgctgtttctcaatgtgtggttatgttaaagaagaaagggatttaagaatggaaaaagtaagagtaagatatgctcctagtccaactggacatctacatattgggggagcaagaaccgctttatttaattatctatttgcaaaacatcatggtggagattttatttttaggttagaggatactgatattgaaagaaatattgaaggtggtgaggctagccaattagaaaatctagcgtggttaggaattattccagatgaatcaccattaaatccaaaaccagagtatgcgccatatcgtcaaatggaacgtttggatatttatcgtaaatatactcaagagttattagatcgaggtttagcatataaatgcttctgcaccccagaggaattagatgctgaacatgaacgccaagttgaagctggtgttgcaccaatgtataatcgtaaatgtcgtgatttaacagctgaagaagtagcagctaaagaagcagcaggaattccttatacaattagacttcgagtgcctgcaaataagacatatgagtttgatgatatgatccgtggacatgtatcatttgaatcgaatgatattggtgattgggtaattgttaaagccaatgggattccaacttataactatgcagttgtaattgatgatcataccatggaaataacacatgtttttagaggtgaagaacatttaagtaatacgccaaaacaaatgatggtttttgaaatgttaggatggaaagcaccgacttatggacatatgactttaattgtaaatgaacaaagaaagaaattatcaaaacgtgatgaaagtatcatgcaatttgtttcacaatacaaagaagaaggatatttaccagatgcaatgtttaactttatggctctattagggtggtcaccagaaggagaacaagaaattttcacaaaagaagaattaattaaagaatttagtgaaacgagattatctaaatcaccttcaatgtttgataaagataagttaacatgggtcaataatcgttatattaaagaaagatcattagaagatgttgttgcattatgtcgaccatttttagaagaggcttatgatctatcaagtaaatcagaacaatggatcaatgatttagttgcaacgtatcatgatcaattatcttatggtaaagaaattgttagtttagtcgatttattctttacagatgaattgaatttagatgaagaagctaaagaatttatgaaagatgaaactattcctaatacgttaaaagtatttaaagcgcaattagagaatttagaagaatttactaaagaaaatattcaagcttgtattaaagcaactcaaaaagaggctaaagctaagggaaaaatgttatatatgccacttagaattgcaacaacaggaatcatgcatggacctgatcttgcgagttcaatttgcttattaggaaaagaaaaggtattatctagattagggtaaatatcgattaaggagcgtttaatttaacgctcttcttttttctgtaaaagaaaaaggattgatatattcattgtttgtgttatattgtatatacaatggaatacacggaggaggggtcaagttactattataagcaaggggaaagagtatgagtataatagcaaaactgaccgaaaagaaagatttttcagcgtcggaatctaaaatcgcagattatattattgaaaataaggaggagatattacatcttacaattagagaattagctaaaacaacatatactggggcatcgactgtaatgcgagtcataaaaaaaatttatgatggtagtttttctgattttaaggtcgatttagcttatgaattacaaaatatgatgagtaaaggaaataataaaatcttatttcaaataaaaaaacaagaaacagctttttctgttatggaaaaaattgcaagtgttgaaaaagatacaatcgatcgaacaaaattgttattgaattatcaacaaattgaacgtataactaagttgatcaacaaggctacaataatctatatttttgcagatggaattaatgagcagattggacacgaatttaagtatatgatggctcggattggaaaagctgtagagattgcaaccgataacttttgggtagcattaaattgtttaagtgaatcggctaatccattagcaatctatgttaatcatcgtgaacataatgttcaattattagagaagataagattaaatcataaaattgcaattcctgggattgctgttacgggatatattaattccacttttgaaacttgttgtaaagaagtgattactattcctactggagttagttattcagatctagctcctgttatttatacaactgcaatacgttatgttttaaatacgctcgtgggctgtgtgattgcttcaaatcatgaattgagtatggataaattgattgactatactgaattatcacagacagtgaaatagttttactttgagttggtacaatgtgccagctttttttttatttgtgagcttttatttagaaacattgttccaaaagaaatgcatatgtttaaaaaataacgtatttatgttaataatatggatagataataaatattaatggattgttactttcagtaggcaagaccaaagagcactaattaaagctttttagtcgtgctttttttagtgttttaaaggagggaacattaagtataaagtagactattttttaagaaaggaaagggaaaaatgagaagaacaaaaagaattatagcttctttagttgcagcagtaacagttatatcgcaagttatgccaatgatgaaagttactgcagcaactgataatgtcagattagcaacatttaatattgcggctaataaaaaacctgatataactaagctaaatgaattattgaagacaaataatgttgatatcgtaggattgcaggaagtggatattaatacaagtcgtaatccatacaatatgttagagaagtttgtagagcaaggtgattatgcttacagttcatttcaaaaagcaattgaaactggtggtggtgattatggtgttgcactactgtcaaacttagaattaatcaatacaaatggtggagctttgaatagtgagggaattaaagaagctcgagcatggcaaaaaggagaaattgaagtaaacggtaaagttattgcagtttataatactcatttgacatatgagtcagtagaagctcgtgcgaaacagttattagagttaaaagcaactatggatcaagatccggcagaatataaagttgcttttggggattttaatgtagatcaaaatcacaatgaaatttatccatttttagaagattacaacattgcaaatggtaaaggtggaaagtggtacgatacctttaatggtactgatgcaagtatgaagactagtgcagtcgataatattattacttctagaaatttagaaattagtaatattacaatggttgaaacagatttatctgatcataatttattttatgccgatgctaagttattagatcaaccagttgcttctagagattatttagatcttgtgattagcgatgctaatgctttagatgaaggtaaatatagtaacgcttcttacaacactttagatgaaaaattggttgcaggggaactgcttgatcaaaatgctactcaagagcaaatcaataaggctgttaaagatattcaaacagcacaggataatcttaaaacaagatatcctaatttagctctaaataaagacgttagtgtatcaggactagaggtgaatgatggaagatggactgcaccaatggcagtagatggtattgtttctagtgatagtcgtgtatctttggctaaagataaagatgagcaatggttagaagttgacctaggtaaaacagaaactatttctaattttgtgattaattatgaatcacaagtacctgctttcaagattcaagttgctggtgaagataaagtgtaccgtgatatttatgaggttagtaatttagaggggcaaattagcaatattcaaaagatttcaattgatcctactgaagcacgatatgttaaatatgtccaattaaaacgctggacacatagtggtaatgggaaacaatacagtggcagtatttatgaatttgaggtatatgaacaagatccagatgccaaagattacagtaatattgcattgaatcggcctgttagcgcttcatcattagaagtaggtgatggccgctttactgcaccaatggcagtagatggagtggtttctaaggacagtcgggtatcttttggtaaaactgcagataatcaatggttattagtagatttaggaagtcgtaagacagtatctgaatttgtaatcaattatgaatcatgcccaccagcatttaaaattcaagtatctactgacggtgtaaactatcaagatgtttatgaagctgctgatcttccagatggaggacctagtgaaattaaagagattcaaattgaagcaacaaaagcaagatatgttaagtatgttcaattaaaacgctggacccatactaataaaaataaatatagtggcagtatttatgaatttgaagtatataaagaaagagatcatacagttacaactgctgatgaagttttaaagtcattgaataaggaagcgccacaaatcaatggtaataaaattgttttaccagcggtacctgatggctttgaaattagtttatacggttgcgataataaacaggttgtagcaatggatggaacaattactcggccattggaagatatggatattaatgtattatatcaagttaaaaacttgaatgatgaaactgatattgcttatagtgaagccgatattaactttattgtacctggagcttataacaaggaagaaagtattaatgctaagcctaatgtaatgccgggattacgggaatggaaaggtaatgaaggagaattcacattatcaaagaattcaaaaattgttgttaaagatgccagtttggaagctactgctaaacaaattcagttttatttaaaagagatgatcaaacatgaacttgaaattgttactagtggtgaaaagagtggtgatattgttttagtaaaagatggtagtgttgacaacttagggaaagaaggatatacgcttgccatcgatgatatgattgaaattaaatctaactatgaaacaggaattttatatggtggtatttcaattacccaaatgttttcgcagaatgatgggatgaataatgtagctaaaggattagcgcgggactaccctaaatatgaggttcgggcaggtatgctagatgtagctcgtacttatattccaatggagtatttacaagaaatgacgatttatatggcatactataaacttaatgaagttcaagttcatgtaaatgattattggggagctacagggtattcagcttttagattagagtgcgatacttatccaatgattacagctactgatggcagctacactaaagaggagtatcgtcaatatcagattgacatgaaaaactatggaatcaatgtaattacggaaattgatacgccatatcatgctgaatgttttagaaatgttcctggagtaaaaatgcttaaagcaggggcgttggatattagagaacaatcctcttatgatgttattgaagctgttctggatgaatatttagatgggccaaatcctgttattcaaagtgataaattccatattggaacagatgaatatgataaatcatattcagagcaaatgcgtaaatggactgatcattttattaattatgttaatgataaaggatatgatacaaggttatgggggtctttaggtagtcgaggatttaacggaacaacaccagtatcaaatgatgctacggttaacttatgggcaccatattgggcagatgttaaagaaacttataatgccggttatgatatcatcaatacttgtgggggatggttatatattgttcctggagctaatgctggttatccagatcgtttggatattgcttcattatatgataagttcgatgttaataatttctcaccaagtcgaaatgccggacaaggtactgcaatcatgccaattgctcatcctcaaactaaaggtggtcaattctgtgtatggaatgatatgacttcatatggtggaggatttacatggtttgatatttacgatcgttttattgatgcagttatgattactagtgaaaaaacttggtatggagaaaagacggatggtcaaactgctgctgagtttgttgaacgggctaataaattaaatagtgttgtacctggggcaaatccgggaagggtagtcgaatcaaaaggagaaaatattacagcaattgattttgaaacaattaaaaatggaaaagcagtagatacttcaggaaataattataatgctacattgaataacgcaattattgaaaaagctaatggtaataatattgctactgtaaatggagatgggtatgtggcattgccatataaatcaattggttatccttatacagtaatgatggatattaaattagacagcaatacatctgaaaataccgaaatatttagtggtgatgatggtgttatgtatgctaatatcgatggaactggaaaaataggatactcacgtagtggatataactttacttttgattatgaacttcccaaagatacttgggtaaatttagctttgacttgtgatcaaaagaatacgactttatacattaatggaaaagcgataacaacgggaattaatatgggcactgcaattaataaccgtaaagattctagtacatttgttttaccagttgaaaaaatcttaaataatgcaaaaggtagtgttgataacattaagatttataataaaacctttagtgcgacagaaatttctgatgaattaggttatattcaattagaaaatttagctttaaacaaaaatgcaactgcatcttccgtaaatccacttactcctaatttgacaccaaatttagcagttgatggagacaatactaaagttacaactaatcgctggtcaagcaaacgggcaacaggtgcaggaactaatgaaggcgatactgaatatggaacagttgaacaagatcttacggtagatttaggggcaaactataaagttgataaagtatttatttcttgggaaggtgcttatgcaactaaatacacgattcaaggctcattggatggtgtaaacttctttgacattaaagatattactaatggtactggaggagaaataactcataaagacttaggtgatgttgaaacacgttatgtaagaattgcttgtcatgatgctaaaaatcgtaattggggatattcaatttatgaattagaagtatatcaaagtactaatgagggattaagagcattagttaaagaaggtcaagctgagctagcaaaatttgatgctggtaataaaaatggaaatattgctaaagatgattatgaagtatttgaacaaaaatttgaggattatttagcacttgcagacggtacagaaatttctactgaggaaattggcaagctattaaaagaagtgactgcgataatcaactcaatagaagatagtgtgatttattcaaaaaacgaattaaatgaactatatcaaaaagttagtttatatcaagaaaaagatttcacaaaggatagctttgttgattttaatacaaaattaactgctattaaaggattaattgataatgctgatgattatattaaagtaaatgaagcaatgggacaattacaaactttagatagtagtttagttaaattggatcgaagtaaattaaaaacagctattgaaagttatgataattttcaagaaactgattatacaacgagttcatggcaaacgatgaaaacaattgttgatgctgctaagcttgtttatgaaaatgtaagtttaaatcaagtggatgtagataatgcgatagctgctcttaatgaaattaatttagaaaaacgaggaaatactaaagaattagcgaaattattaaaagaatacgatgaggctgattatacaataagtacatgggcagaatttgcaggagtatatcaggcagcaaatgcaatggtagtcgataatagtgatgttaaccaagaacaagtagatgcaatggttgcattagttcgagaggctgcgatgaaacttctagaattaggtaattcaaaagaccttgaaaaagttatcaataaaataactgaagcgataaaagatctagatcaagctaattataatcaagattcatggaataaacttcaaacaatgattaaggcagcaaaagaattattagatagtaaagatgtatctcaggcggaattagatgctatgttagattcattaaatcaagtttatgatgctttaaaaccaatagaagtaaaacctggtgaggaaacggaaacaccaactaacaaaccagtaactgatacaagtgataaatctgtaaaaacaggtgatgatgttaatttatttggttatgcaggattattaggaatagctctaatgggattaatttgtcgtaaaaaatttgattaattaaaaacagtatttttgtggtgaccctctataaagtgatatgtgtccagaattctagatatctatcactttagggggtttttatatggaacattgtgccatgtttatatcttttatacgaaacattgtaccgtaattgtatagacacatttcttttatgtataaatagtgctatattaaaaatatagcaaaggattgttactttcagtaggcaagaccgaaaaagcgagatgctttttagtcttgtctttttttactaaaaacatctggcttcaaaaaaaggagggacatgcacagagggaaaataagtaagatttttattaatcaaagaaagggaagaattatggaaaagatattaaggaaaggttttatttcattattatcactcttgatggtatttactacatttaaccaacttattacaaatgtagctgctgaacaagagtatgaaaatatcgcattggataaagtggttgtggcgagtagtgctattgccggcaatgaggggagcaatgcagttgatggtaagatggatactaaatgggaagtaggtaatattagtacaaacccaagtattatagttgatttagggaaagaggaaagttttgaaaaaattacattaaagtgggctagtaattttgcatttcgttataaactatatgtggctaagaccgaccaaaaatatggacaagtcctattccacgaagagggtactggtggcgatgaagaatgggaaatggaagaaaatacaattgcccgctatgtgaaaattgaactgattgaagctaagagcggagaaagtacgattggtttaaaagaattagaagttttaagagttaagaaggatactagtaatgatccagttaatattgctttaaataaaccagcatatgcttctggcaatgaagctaatttggatcgtcttggaccaggtggagcctttgatggtaaatacagtaatgattataatgaacgctggtcaagtggaaatattactaagagtccccaatggatctatgttgatttagaagcagaaatgacattttcatcaatacatattttttgggaaaatgcttttgcgacaaaatatgtattgcaatattctaatgatgttggaactgataaaaattggataacatttgtaaatgtagatgatggtaagggaagttgggaaaaatttgattttgatccaattacagctcggtttgttcgtttatatgctacagcaagtaatggtgttggtagtgctaaaccgatttctatttgggaaatggaaatttatgaagaagtaaataatagtcttacagttgatgatattgccaaagattttacaatcggaacaattacttcaaatatggataagatgccagtatatcattatgataatgataatattgtagcagaaattttttgtagtgatactgactttgtagttgaagataatggaatgattcataagccattggtagataaggaagtgttagttacttatattattaaagataaaagaactaatgcaactaaggaaatgaaaaatattccagttataatttcagggcaaaattcagttgctttagatagtaatcctgtccctactacagttccaacgattcaagaatggaatggagcaacaggaacttatcaattaactaataattctagaattattgttcaagatgaaagtttatataaagcagctcaaattactaaagatgatattaaggatttatttggattagaattagaaattagtaatacaacagtaaaaaaaggagatattttattaactaaagaaaatgcggataccactattggtgatcagggatatacattagaaattggggatagtattacaattaagtcaacaacttatcaaggtgttttctttgaaacacgcagtgttttacaagcattagttgcaagtggggatgcactgacaattaataaaggtgaagcacgagattatgctaaatatgaatatcgtaaattcatgttggatgttgcccgtaaatatatgccaatgtggtatttaaaagattttgttaaatatgcatcttggtacaagttcacagatattcaagtacatttaaatgatacttcatacaacggtcattcgcgttttagattggagtcagatattccaggattaacggcaacagatggttattatacaaaaggtgagtatcgtgatttccaatattatgctgaggattatggaattagaattgtttctgagttcgatactccagcacattcagcagtgtttattgacaataattctgaattaggatttgatggaacacatttagatatacgcttaaattctgataaaaaagaaacagtgtataaatttattgctgatctatatgaagaatatatgggtggagataatccggtttttgtaaccgatgcatttaatgtagggcttgatgagtacaatagtgcatacaaggaagatatgacccagtatactcaatacgtaatggatcttgtttataataaatatggtaaaacgccaatggcatgggcttctatgggatgtgtagattctgataaaacaaaaataccagattatccaattatggatgcttgggcaaattatgcaatcagtttaaaatcattatttaatcaggattataaattaattaacgcaactaataagtatggttatattgttcctggcgggaataatggttatccagattttgcgaaagaagaagaaatgtacaataacttaagtgctggaaaatttagagataaaatgggcgctggagttgatgttgctgaaggacatccaaaaattgttgggggttcgatttcattatggaatgaccgaggaatctttaatgggatttctgtttatgatgtttttgcaagaacacaaagtatcttaccaatatatgctcaaaccttttggtacggtaaagataatgacaagtcatatgaccaatttaaagctgaggtcaatactttaggtactggtccaaatgttgagatggataaagaaattagcagtaaaacagaaaaagtatatgactttgatatggaaaacacttcaaaacaaggggataatttagtcattaaagataattctggaaatggttatgatgctactgcaatcaaagcaacagttgaaacaactgatgaaggtcaggcattgaaattaaatggtgatggttatctacaaatgcagcatagtgcattgaaatggccgtatactttagcttttgatttaaaaatcgatgaatcacaaacaggcgatattgtattatttgaagaaacaatgccaatagaagaatgtaatcagtggattgatacaaagtatcaaacaagaaaaatctatttaaaagaaattgatggtaaatacaagctgatgtacgatcgtgatagttatcattatgagcataatatagaacttgaaaagggaaaattatatcaattagcttttacttctgataaaaaatatactaatgtttatctagatggagtagttaaatcaacgatcaatggaccaattcttaccaattcggggaataagtggtatgattcagcttcaatcaatttaccactacaaaagattggacaaaatttagtaggaacattagataatattaaagtttataatcgtttattgaataatgaagaaattaaaaatctttatgatacaggaatagatgttattcatgaaaatattgctttgaataaagaagcaacagcttcaagcagctatactgattatcaaacaccaaataaggcatttgatggaatcattaatcaaagtgctagtggtcctgagcaatcacgctgggcgtcagcacgtacgcatgatcagtggatccaggtagatttaaataaagtttataaagttgatcaaatcaagattacctgggaagatgcttatggagtggactatgaattaaaaggctcagttaacggtaaagactggtttacgatcaaaaatgtaactggtaatgtagctaaggaaaataatcatactggattaggtgatattgaagcacgttatattaaattaattggtacaaaagctgctaataacgctaagtatggatattctatttatgaaattgaagtatatgaaaatcctaaaaatgatttacttagaacaattagtcaagttaaagataaattaagtgaaatgaatgtgggtaatttccacggtcaaatcaaagaagaagcttatcaaactttcacggcttatttaaccaatcttgaaaatgaagtggtaggaaaagaaagtatcagtgaagaagaaatgcttaagttcaaagaagaattgtctaaaaaatacacaaatttaaagaaacaggttgtaagagttgataaaggtgctttagaaacagtgcttgaagtggcggagagtaaactggcagaagggtacagtgaagcaaatagtacagtttcaagctggcaaagtttcatacaaaacaaaaaagcagctgaagcaatggctgatagaatggatattactcaaagcgatgttgataagatggtatctgaactgcaaacagcattagataatttaacatttagggcgttggaatcgtcatttaatgaactggttgcactgattgatgaagttactaagatggaaactgattattctgcagaaatgtttaaggttatgaaaggatatcttgatcaagcaaatgccttagttgcactaggagcaggagaagtagttgaaaaagatgttcaagccaatctaacaaatctcgcaaatgaaaaagccattctgattagttactgggaattaaaggtaagcgttgaagttgcaaaagagattttggataaagaagcagtaaatcttcggccagctactttgaaagtattgcaagatgcttatgaagcaggaagaaaactaatagatgataacagtaaggaacttatagttttacaaaatgcaaaacaagaaatcaatgaagcgattgaaggacttttagaaatagtagagcgcaaggatttagataaattgattgaacaggttaaagatttaaaagaagaagattatactgaagaatcatggaaaacgtttaaaaatggttatgaaagggccgtcacagttaatcaggatcttgacgctaatgaaggtgctattcaaaatgcctacgatgaattactaagagctttcaatgaattaaagcaggttgttaataaagataatttactactccaaattgaattggcaaaacaagttcttgctaacaaagataaatatgatattgagttagtcaaggaattagaagaattattaagtcaggcagttgcactgattgctaatgatgttagcagtgaagatgttaataaaatgagtgatgctctattaacaaaaatcgaagctgttaaagctagtcaaaaagaggaaccgaaggttgaggaacagccagggactgaggtatcagacaaaacaaagaaaaatgctaaaacaggtgatgaaacaatgctctttgaatttgcaatgatatcattagttgcacttttagctgtggttagattaagaaagaagagttaattagttaaagggtcatgttcaaaagcgaatatgacccttaattatacaattaatcgattttattaatcgataatgatataatattgtagagataaatgtggggtgtatgagatgaaaattaaaaactttaaaagaatctatgtcgacatcgtgatatcatgtttgatcattgctgttgtcgcaactttttttgcttttaaatctcaaacaatttcacaagaacaggttctaaatacgttatcagaaatttctagtcaaagtgtaaatgtgattgataaagagattcaaaaaaatgttgcagttttagcaaatttatcaatttatattagccaagaggatgcttttgatcccatcaaaattattaacaaaataaaaaaagtgaatgaaattaataattttaaacgaattggaataattgatgagagaggacagtcctatacgacagatgataataatattttattaaatgaacagcaaatgacccgttttaataaagcgatgaatggtgaagtatcaattactgatacattgccggatttgattgatggtgaagaagttagtgtttatacgttacccataacctttgataatgatcaacattgtgtactttttggagcttatgcatcacggtattataaagagactttatcggtttctacatttgatggtttagggtatagttttattattaaggaaaatggtgataaaattgtagattcttctaacaagacaagcattaaattttctaacttttttgatgatattggggcaatttcaaaagaaaataaagaaaagctggaaaatttaaaacataatattaaaaatgaaaaaagtggatttttagagtatgatcggacagatgaagctagatatttgtattaccaaaagcttgatgttaatgattggtatttgttgagtgttattcctgcttcggtggttgataataatattaatggaatgctttttttaggttatatgatgctaggctgctgtttattaggaattttatatttaattactcgaattgtattgatgtatcgtaataatcaaaaacgtttagaagaagtggcactagttgatgaggtaacgggatgcggttcatatacacgctttagactggctggtggtgatattttaaaatctaccaaatctaaatatacaatggtttatttcaatattttgaagtttcagtatattaatgatttatatggctatgatgagggtaatcttattttagtgaaaatagctaaaattttaaataatttgttgcaggaaaaagagttttgtgcacgaattcaagctgatcactttgttgctttattacaatatgactctgttacacagttgaaaaagcgggcagagtatatgattaaaaatatggaaaatgcaattaacagtaatgatgaagcagcttatcgaattaaaatgattgttgggatttatttaattgaaaattataatgatcgaattgaatcaatggttgatcgagccgcaactgtgattcgtgatgaaaatcgccatgaactagagaattgtaatttttacaatgataacattcgtcaaagaatgtataaaaataaagagttggaagacttgtttgaggaagccttgcataatcatgaatttgaagtttattttcagccaaaatatagtacaaagaaaaaaagactttatggagctgaggcgctggttaggtggaaaagcagtaaactaggatcgataagtcctggagaatttataccggttttagaacgcagcagtaatattattgaattggatgagtatgtttttgtaattacgtgtaagcagattcgtaaatggcttgatgatggtcttgaggttgctcctatagcggtaaatgtttcgcaattacatttatatcgtcaagattttgttgaaagttatctaaaagtaattgatgcttatcagataccctataatttaattgaattagagatgacggaaacaagtttgtttgataatcgtgatattttaaaagatattctcaataaatttaggaaattaaagattacagtatctatggatgattttggttcaggttattcttcaatcatgatgctcgaatcaatgccaatcgattgtttaaaaattgataaaacaatgattgatgatttggaggtcaattcaaaggctaaagaaattttgaaatcgattattagtttagctcaatctttagggctagtcgttgtagctgaaggtgtagaacaggctggacagtatgaggaattaattagaatgaaggtagattatattcagggatattattgtgctcgaccgctgccattagatgagtatgagaaaattttaaaattaaaaaagtaaaaagattcaattattttaacgtaattttttgaatttttttagaaatttctaagttatgattattgaaacttaaaaagtcttaataatcataaaatctcattgatttttagctggaaaaagcataagatagttcgtgaatatagaaaaatggatttaaagatgggagagggtgatagcatgaaaaatcgaattatatcagttgttttaagcttctttgtcatagtaaatataattttaattgcttgtgccttcaatgttacccccctaacgatcaaaagagatacatttgtttatgaatatggtagtgaaatatcgactaagccgcaagattatattaatgctaatgaggcaattttatcacaagttattttgaatttttcgaatttaaaaaatgaaattggtgaatataaagtatctgctacatatttaggtgttgaatatcctttttatataaagatagttgatacaactaaaccagttgtaacattaaaagcatctacgtttaatgttcatttaaatactgaagtatatgcaattgatttaattgaaaaggttgaggataattcagatatagctgcatattttattgatgaaaatggtgagaagtcaacacataaagtgttcactgaaaaaggttcttatgttgaaaggataattgttgaagatcaggcaggaaatcaatctgccagtttacgagttaaaatagtagctggacaaaatggtaataatcctactcttacaggaattgatgatattgaggtattaaaaaatagtaaatttaatcctcttgatggagtgaaagctactgatggtagtgggaatgatattactaagaatataaaaattttaaaaaataatgttaatacagataaagttggtgattatgaagtaatttattcaattacaaatgataaaggacataatctccaaagaacaagacgcgttagtgtcattaaaacagaaaaggcaggagaatagatgataaccaatgctattattatcatatcgattataatctttattttaattaattttattgataagagtaattatgataaaacctctttagcgattaaatacggggctttttatatgccgcgaattgaagtaaaaaaagaatattggcgttttattaccgctaatttcgttcatatcgatattatgcatatttttatgaatgtatattgtatttataatcttggccatttttttgaatacttattaggaacgggcgcatatttatatctaatcttcataagctgtcttgctactagcggagcttgttattatcatggtaaaaaatatgcttatgcatataatactgtgactttaggagctagtgggattttttatggttatttaggtgcaatgattgctttaggaatacttgtaggcggttattttgattatatgttgcaacaatacatatatgtgattttaattaatgtagcttttacatttttcaatcgtcaggtatcaaaggcgggacattttggaggtctggcaggtggctttttagcaactgcaatgttgattggttgtggtgtatggcacttttagttgatggtgatgcttgtcctgatttaccagcaattaaagatttagcttggaaatatcaggttgaaatgacggtttttgttgattatgctcattttatacaggatgattattttagaactattatatgtgaagtgggaagtgacagtgttgatctagttttattgaaacaggttcaagcaaatgatcttgttattactcaggactatggtctagcaagtttagtgttatcaaaaggggctaaagttttgcatatttcaggaaaagtaattgatgataataatattgaagaattattaatgagtcgttatgtatcagctaaacaacgaaaaagtggtaagcggacacgtggaccagctaaaagaactgatgaagtaagaaatcagtttttaaaacaattagataaaatattgatacaggcatgaattattctgatgatttgtgcctttttattttaatgttcatcaatttaatgtataattaatatgataatattgtgatgtaaaaaggggtggtttgatgaaaacactaaaaacaattttagtattgttaattatgtcaatgctgatcaatatcatcccaattaaagcagcctcccgaactgttaaagttgcttatccaattcaatctggattaacagagatagatgaagatggattatattccggctatacttatgaatatttaaaagaaatctctcgatttacgaattggaacttagaatttgtacgcttagaaggcacagtaaatgagcagctgtcaagcgctatggaaaaggtcaaaacaggcgagattgatttaatgggtgggatgctctatagtgataccttaatcaatgattatgattattcggcaaccaattatggcatgggaaatatggctatctatgttaattctaataatgctgaaatcaatgatactagtatatattctcttaagaatttaaatgttggagttgtttcaactaaaaaggaaactaatgttaatttaaaagattttggagatattaatggaattaatattaatcaaatattttttgataataccccagatttattaacatcattagagagaaatgaaatagatgctatggtattatcagatttatcaattgaagaaggtaattatcgggtcgtagcacgtttttcgcctcgtccattttattttgtaatgacaaaaggaaatcaagaactgatgtcagagctaaatgaagcgatgacacagttaaataaagaacagcctaattatatgagcaatcttcatgaacgttacttttctttagcgaaccgtaatttcattcttaccgaagctgagaaaggttttgttgcaaataattcaaaaattgatgttcttatattgggtgggaaagccccaatccagtattatgatgaaaaaaaaggcaaggttgtaggaattaccgttgatgtgcttaattatattggaaaactgagcggtttgaagtttaattatatttatgccaatgatattgatgaatataataagcagattgagacgaagaaaccaatgattattggtggggtgtataatagcaatccagaaaaatatattacgacgaaagcttatttagattcagcgatgacgctagtaactaataaaaatattaatgctaatgagctagacggtaaacaggcagcaatgatttatgattctgaagttgatagtgccgcagttggagatagtagtaacaaagttaattattatggaactcagttagaatgtatcaaagcggtagaaaacggcacagctgactatacgtatataaataatcatgttgccttgttttataatagtaattatgatttcaagaatattaatattattcctcaagggaatttaagaaatcaaggcagttattttgcaattaatacaggtgttgcggatgagcttttagatattatcaataaaggaattgatgtcgtatcttacagtaagattgaagaaattatatttactaatgccagtaccagtgaaaatgatgttactttctttgactatgttgaaaataatcaacttcaagtagctacttttacgcttatggcagttgccattattgtgctgtttttcttgatttggcgtaattatataaataaacgtaataatgaaaagattttaagtgagtataagcgttatcaacaaattagtgaattttctcatgattgctttgttgaatataatattgcaactgatacccttgttttaatgggaggtggagccaaactgctttcaaaggaaacgattattaaagattttttaaagagaccaatttctaataaagatactttagaaatgagtctacgtaatttgacggaatgtgagagtgaggagtttgttaaatttattgatgggaaaaaacgttggttaaagattaatttgcgtccgatttttgatttgaataataaaccgacacatattattggaaaggttattgatatccattctgaaaaagaagaacagttattatggcgggagctggctcaaaaagatagtttaacaaaaatttataattctgcagcttgtcgtgaaaaggcagaagagtttttacaaaataatacagcagcccaagttgctttgataattattgatattgataactttaaatatattaatgatacttatggacatttatgtggtgatattgtccttcaaaaaatagctcaggcattattggaagtgagccatcctttagatatctttggacgggttggtggagatgaatttttaacattaataaaatatcctaagagtattgaaaaagtagctgagtattgtcaaaatatgattaaatcaacttcaaaagtagaataccaggggacccatattattacaagtattagtgttggtgccgtagtttcgagtgtttcgttgtcttatgatgaattatatagattggcagatgatgctctttatcgtgtgaaaaacaatggtcgcaataattattgtattattgattatgataaagaaaataccagttcgtaaaagaactggtattttcatttaccgctgtcaccatagttttttaaaactcgagcactgggatcatcaacattacagttttcccaatctttatttggcatccaaaagtctttgacccattttgcttgccccggataaaacgattcaaaaatatcacggtataagagagattctttagtaaaaggtgttgcaaaagcatatttttctttagctttaataacatcttcatcagtatataaagtagctgcatattcttttaaataatcaaccattgaatgaccaacagcgtctgaaaatgcggccttttccctaaataaaatttcatcaggtaaataatcctgattttcaaaagcatgtcttaataaatattttcctttattatagatattcattttcttagctggatcaatactcattgaataatcaacaaaatcaatatctgcaaatggaacccgtccctctaaagcgtgagcagagatacaacgatcagctcttagaacatcatacatatataattctttaattcgcttttgtgcttctttttgaaattgtgatggatctggtgcaaaatcagtatatttgtagccaaataactcatcgcttacttcaccggttagaataacttttaaatcagttttttcatgaatatatttacataataaatacattgccatactggctctgatcgttgtgatatcataagtttctaaatgaaaaataacatctcttaaattttctaatagatcttccttggtcataattacttctgtatgatcagttcctaagtaatcagcaacttgtttagcatactttaaatcaataggatcagtatccataccgattgcaaaggttttgattggttgatcatttaaacgtgcggcaatcgcacaaaccaaggatgaatctaaaccaccgcttaataaatatccgattggagcatcgctttgcaatcttttttccactgctttttctaatttgaggcgtaaatttattgcaattgtttctaaatcatcgttattgatcgttttaggattacttaaatcattataacaaataaatttgccatcttcataataatgccctggtggaaatggcattatttcttggcataaaggaaataatccttttgcttctgaagcaaagcagatcttaccgtcttctttatgatatccatagaacatagggcgaattcccattggatcacgtgcagctaaaattttatcctttttggcatcatagattaccattgcaaattcggcatctaaaaatttacataatatctctatcccgtatttgtgatatagcggaatcagtacttcacagtcacttcctgacttaaaagtatagtccgtttttaacatagcttttaagctatgatagttataaacttcaccattgcagacaagaacacaatccttatagacaaaaggctgattaccttttgatgacaaatccataattgaaagacggttaaatccccaggttataccgttgttaatgcttacatgttgatgatcaggaccacgataagcagcctgatttaatgcatcattgaatacttgtaattctaattcactacttcctactactaaaaaaccgcacataatttgtttcccccttaaaattattgttgcgagaatataaaaactcgcctaaagaagcgagtaccgtataactagaaaaggaatttatagttacatggtacggaaaatacttcatagagtactcgatacccgccaatagtaacgttactggtaacgttctagcctacttgcataatgctttcggtagacagctcttaggtgttcttcataaactacttcactatcaggcttgcaccgttccctgattcgctaaagcttctgtagattactactctcctcgtcattgcttttaattactttatagtaattgaaaatagtatatattatttttttattaaatgcaataaaaaagcttcaatacgatagaaaaaattgcaaaataataaaaaaccatcatcagatggttttacaaacatcaatccattctgctttaatatagctagaaagttcatcaatcgttaattcaatagcactgttagaattgccgcaggcaggaaaaactgtttgaaatcgcttaagtgattcatcaagatagatagtaacatcaggattaacgccaaaagggcatactcccccaatatcatgaccgatgattggcaatacttcatcgcgtgcgagcatttttgctttggttttaaaggtttctttgtatttgcgattatcgattttaacatcaccagcagtaacaatcaaaatcgcgcgttcgttgattttaaaagataatgtcttagcaatacgttcaggcgcacagtttaaagctttagcagcaagttcaacagtagcactagaaacatcgaattcgataatatcttgttcccggttgaattgtttcaaataatttttagcttgttgtagtgacatgatgcaacctccttataaattaaagcaattctaccataattattaatattttcaagcaaaaatattgagatgataataagactaatttattattgatttgagactaaaataggttattttagggttataatactagtatcaaatattatctttaaatatatttgacaaaataactatcttttaataaactttgattatattgagaggtagaaaaatgacgtataaattaattgcattagatttagatggtactttgaagagtactgataaacaaatcttaccaaagacaaaagccatcttgcaggagctggcaaaaagaggtgtagtgattgttttggcttcaggtcgtccaactgctggattgtatgcagaagctaatgagctggaattagataaaacaggtggctatttactatcatttaatggtgctaaggttgttgattataaaacaaaagaaatcatatatcaaaaagtgtacgatgctaaaacggcacatcaggtttatgagcgagcgaaacagtataatttggcggtaatgacttatactgatgaattgattcttacagaagatgaaaccgatgagtatgtttgtattgaaggcgatattaatcatatgccaatcaaacatattgataattttaaagatgcagtgaatttttctgtaaataaagtcttattaacggcaaagcctgaatatgctgagacaatacttgatgagtttaaggcaccatatggtgattctttaagtatttatcgttcagcaccatttttcattgaagtgatggcgcaaggaattgataaagcggcttcattgcaggctttaattgagcgtttaggaattaaacgagatgaagtaattagctttggtgatggttataatgatttgagtatgattgagtttgcaaaattcggtgtagcaatggccaatgcagttgatgaagtaaaaaagagagcggcttatatcactttatcaaatgatgaagaaggaatttatgagtgcttaaagatgttaagtgaaaagggtgaaatttaatgttaccaaatgatattaatatgctagtgagttttttaaatactaaattacgtgatgatgatatgtcattggcacaaatattagaaattaatgatgctaatgaaattgaaatcatggaattattggatgtgaatggatattattttgatgaaaaaattaaccaaataaaaattaaataaggcagatcaatatgatttgtctttttttatgattatatttttaatcatctgatattattaaagacaatcttttactttttaatgataaatgctataatgtaatttaattaagggggacatgtcaaatgttgaagttagaagattttaaagccgcaaagcaaagagttgatgaagtaattttagagacacatttaattcatagcgatgctttttcagctgaatgtggtaatgatgtttatatcaaaccagaaaatttacaaaaaactggtgctttcaagattagaggtgcctataataagatcgtgaaattagatgatgaagctaaaaagcatggattaattgcatcttcagcgggaaatcatgctcaaggggttgcttatgcagctaataaactaggagttaaggcaactattgtaatgcctagtcatacaccattgatcaaggttgaggcaacaaaggcccatggtgctgatgtggttttagctggcgaggtttatgatgatgcttacgctaaggcagttgaactacaagaaagtgaagggtatacttttgtccatccgtttgatgatgaagatgttatggaaggacaagggacgatcgcattggagattcttgaagaattaccagatgctgatatgattttagtaccaattggtggcggtggcttaatttcggggattgctgcagctgctaaattaattaaacccgatattcaaatcattggggttgaacctgaaggagcggcaagtgcttctgcagctattcaagaggatcaggtagttttattgagtgaggttaatacgattgccgatggtacagctgtgcaacaaattggctctaaaacgtttaaatatattaaagaatatgttgatgatattgttttggtcaatgactatgaattgatggaagcattcttgttattagttgaaaaacataagctggtagctgaaggttctgggattttagctttagcaggattaaagaagctaaaaactaaagggaagaaagttgtatcattgatcagtggtggaaatattgatgtgttaactatttcgtctatgattaataaaggacttatttcaagaggacgaatttttactttctctgttcaattacctgataaaccagggcagttggaattagtatcgaaggttttaaatcaatgtaatgccaatgtaattggtgttgaccataatcagtttaaaaattttgctcgtttttctgaagtagaattaagagtaacagttgagactaatggtaatgcgcacattcaaatgattattgatgagtttaataaacttgggtatacaattactaaaataaattaatatttttacataagggtaggcagcagcttatcctttttatcatatttatttttataatatgaaaattagaaatattgaagggattaggcttttataatgaagatatatgatttatttatatgaataaaaggagagtgatttaataatggagaaatggtggcaaaaggaagtagtttatcagatttatcctaaaagctttaaagatagcaatggtgatggaattggtgatttacaaggaattattgagaaattagattattttagtgatttaggggtaacgagcctatggttatgtccaatttatgcttcaccaatggatgataatggttatgatattagtgattattatgcaattaatcctatgtttggaacaatggaagatttggatgagttaattaaaaaaggaaaagcacgaggaattaagataattatggatttagttgtaaatcacacctctgatgaacacccatggtttaaagcagcaatcgctgatccgacgagtaagtatcggaattattatatatttaaacatggaaaagatggtcgtgcgccaactaattggcggagtattttcggtggctcagtatggcaaaaagttactgaagatgaatattattttcatgctttttcaaaaaagcaaccatgcttaaattgggaaaaccctgtattacggcaagaaatttatcaaatgatcaactggtggttagataaaggaattgcaggatttagggtggatgccattaattttattaaaaaggatcaacgttatcaagatggtgagcctgatggtgaagatggattagtgtcttgtatcccttttgcgcgtaatcagccaggaattgaagttttctttaaggaattaaaggagaatacgtttgctaaacatgactgtatgacaatttctgaggcttatggggtatcatatgataaattaggtatctatattggtgaaaatggatgttttgacagtatgttcgactttaattactctaattttgatattggagataatgaggaatggtttattcgtaaagactggactgtaaaacaatttagagatttactatttacttcacaagtcgaagtaaataaagtaggctgggtaggaactttcctagaaaatcatgatcagccgcgttctttagataagttgattgtaaataaagcagatcatggttattatagtgctacaatgattgcttcaatgtatttctttttaagaggggttccctatatttatcaaggagaagaattaggaatggcaaattgtgttcggcgatctattgatgattttgatgatattagttcacatggccaatatcaaagaatgcttgaagaaggatttagtgaaagtgaggcattggctctagttaataaacgcagtcgtgataattctagaactccaatgccgtttgatgacagtcaatatgctgggttttctgatgttgaaccgtggttagcgttaaatgaaagttatccagttataaatgttaaggcacagtttaatgatccggattcagtttatagtttttataagaaaatgatctatttaagacaacaaagtgtttatagtaatactttaacttttggaagctttattcccgatgaatgtgaaaatgataatttgattgtctaccagagaagttatcaaggacaacttattgtcaatgtatgtaatttttcgaatcaagagcagccatttatttgtgctaaagagcttattttaaataattataaagaatatgatggtaaagtattgaaaccatatcaaacgattatgtatcttgaagaaaataaataaaatatgataaaagagatttcattcaatgagatctcttttttgttggagggaaatgtgagatattattgtcgttctccttgtcagagtgtcattatattagtgatataaatcaacaaaggagcagaaagatgaaaagaaaattaaatcaatatattcgaaagtcactgttagttgcagtgacttttattttggtgttttgtaatgctgtaacttatgtcaatggacagcaatatcaaattagtgcaggtgagaaaattaaatatcctagctggtttgacagtagtggaacctggtcaacacgaatgtatactgtagatggaaaaatagcatattgtttagaagcaagcaaacattcaccaggtaatggaactgtaggagaaggaagttatgtagataatgaaaatcttcaaaaagtactttattatggctatgggggtcctgctgatacactatcaacagatggtgtaactagtgttgaaatggcatatctgttaactcatattgccgcaagctattattatgctggagatcttcatggtgttgacttggaaaaactacgtggctggggctgggcagaatggatcgaagcaatccctaatcgtcctgcaattcctaaaggagagattggattttcaaaaaatagtttgaaaatgtatcaaaaagatggtagtcagcggagtgaagaaattacggtaattggtgatgctgatgctactttaacgatggttttagacaaagacatggaattacataatttaacgacaaatcaaacagttactgggacggtacaattaagtagtggtcaaaaattctatttatcgtctccattaaccaaacgagacaattataactggtcgagtggttctttgatgggaacaacgaatagttattatcgacctttagttttaacgattgacgatgaaacccaaacgattggaacaatggttttagggaatggagaaaccaaaccaactagtttgcaagtagaatatttaccagtggggagtttgaaattaatcaaaacaaatgaggataaacagatgctagatggggcggtatttaatttgaaggggaaaaataatgattataatcaagatcatgtggttaaaaatggcgtattacaaatagataatttattagttggagattatatcttaacggaaattaagacaccagccgatcatgatagtcttaataaggaatacactgttacgattaaaagtaatgaagtgactacaaaaacaattgtcaatgaattgataccagtcggtaaattaataatcaataagaaactagaaggacatttagatgatttatctggaattgaatttaagataactgctaaggaggacattaaagatataattacagggacagttctttatcgagctggtatgccaattggtcaaaatcaaggaatttatattacagatcaaaatggacaaattattattgataagttaccgatgggaagttatcttattagtgaggtaaagactttaccgggatatgtatttgatgatactgtttatgaagtagcttttaataaagaagatagggttaccaaagaataccagtatactttaaatgtagaaaataaattaacacaaacaacaatttctaaaattgacgctctaactaagcaattattaccaggagcaacattagaactatatttaaaggatggagaatcattgagtttgattgaacaatgggtatcaactgatgatgcacatttaatcaaggggctgttagttgattgtgaatatgttttaaaagaggtcaaggctccagccggttatacacttgcgccagaacttacgtttaaagttgagaacagtgagagtataaaagaaatagtatttgaaaatcagcatattcctgtggtaccaactggtgatataagcaattatagtggttatgctggaattgcattaataagctttatattctttttaatttttacaaaacagaaatgtagaatattataaatatgacgaaagccccagttaatggggcttttaattaagctattaaaatgaaattattaccaatatttattgatagtcatatttaaatcaacgttaccattgattcctctaatttgaccagtttcactatattgtaaaatatgatattcttcttctaatactggagtatcattataacgtgctttccatttaatgtaagaatctagttttttatcagttaatttagttgtccaccagtgatgattagcatagattccttttttattttgattttgaatgttatctaaaaaagttgtagctacgattgttaattgatcatttgttaaagccccttgaaaagtttcgtcttctaaatcaataaaaaccccaagttcgggaactcttccatctagtaaatgattaacatactcagcctctttttttgcttgagcagcttcagtggctaaagaataataatatacaccgtaaggaatatttaaattttgacattgcttgatattttgttcaaaaagcggatcaactttggttttggtaccatcagttagagaagtatagccgcaacggataatcacaaaatcaatttcttgacgagctaactgcaaattcacattattattccatttagaaatatcaatgccaatatattggccgtctttagctaatcgatcattatgattaaagactaatataccagtaacaattaaactaaatgataaagcagatacgatgattttgattagattatgttgctttttaaatcgcttaaataaaaatggcagtaaacaaaatatcataattagtaaaataacgatactatgggtcagatactttggtaaatattgtttataatataatgaacatgaaaaaagaagggtaccagcaataaaaagaaaaataatatttttttgactaaaaattttatttttagttttctttttcatgatatcacctcgacaactaattctaacataattaaaaatagttgtcgattgatgcttattgatgattttgtttttcaagttcttcaagaatttgatctaatttattatgaagatcctgaataatgatttcagttttcaaatttactttataatcattttcgtttctttgacgatctttttgctcttgacgattttgtgacatcataataataggtgcttgaatcgcagcaatacatgacaaaatcagatttaaaagaataaagggataaggatcgaggctatctttagcaaggatattataaatcatccaggaaattagtaatataataaaaataatgataaaagtccaactaccaccaagatgagcaattttatcagcaattttttgtcctagtgtttcatccttaccatcaggtaaagcaactgttttttcaagaacaagatgaattatttcttcatcctgcatatcatcacgaacattttcaatgatttcatttattattttagtgtgtgttaaatttttcattaaaaccatccttttatatagtatttacagcttgttttgttttaaacgcaataactagattttaaataaaaatatggattttgaagaaggtttcttacaatgataactaattataaatttgttgaatagtgtcatttagttttgtatactaatatggataaagttatgaaggagtgattatgatgtttaaagtatttggtgaacgcattgttaagactattactgatcattttcaattcttttatatttctattttttataattaacatatcatttaattgatatgtttttttgtgaaattaatcaagattatacggaggaacaaaaatgccaaaaagagaagatattaatacagtattagtaattggttcaggtccaattattattggtcaagcttgtgaatttgattattcaggaactcaagcgtgtaaagctttaagagggttaggttataagatcgtgttagtgaactcaaatcctgcaacgatcatgacagatccggaaactgctgatgttacttatattgaaccattaaatgtagaacgattaacacagatcattgaaaaagaaagaccagatgcgttacttcctaacttaggtgggcaatcagcattaaacttatgttctgaattaaatgaggctggtgttttagaaaaatataacgttcaagtattaggagttcaagttgatgcgattgaacgtggtgaagaccgtttagaatttaaaaaagaaatggataaattaggcattgaaatggctcgtagtgaggtttcaacaactgttgaagaagccttagcaattgctgaacggttaggttatccagtagttgtgcgccctgcttatactatgggtggtgccggtggtggactggtatataacgttgaagaattaaaaacagttgtatctcgggggttacaagctagtttagttggtcaatgtttaatcgaagaatctattttaggttgggaagaattagaagttgaagttgttcgtgatgctaacaacaacatgatcacagtatgtttcattgaaaatattgatccattaggagttcatactggagattcattctgtagcgctccaatgttaacaattagccaagaagtgcaagatcgtttaaaagaccaagcatttagaattgttgaatcaattggtgtaattggagggacaaatgttcaatttgctcatgatccagaaactgatcgaatcgttgttattgaaattaatccaagaacatctcgttcatcagctttagcatcaaaagcaacaggattcccaattgctttagtttcagcaatgttagcggctggtttgactatggaagatattccttgtggtaaatatggaactttagataaatatgtacctgatggtgattatgttgtaatcaagtttgcacgttgggcatttgaaaaattcaaaggggctgaagataaacttggtactcaaatgaaagctgttggggaagttatgagtatcggcaaaacttataaagaagctttccaaaaagcaattcgttcattggaaattggacgttatggcttagggtatgctaaaaacttcaataagttatctaaagaagaattattacatatgttaactgttccaactagcgaaagacaattcattatgtatgaagcgttaagaaagggagcaacagttgaagaattatttgaactaacacaaatcaaacattatttcattgaacaaatgaaagaattagttgaagaagaagaaaatataaaatcatacgaaggtaaagaattaccggctgaagtactaaaacaagcaaaacaagatggattctcagataaatatttaagtcaaattttgaatgttgaggaaaatgtaattagagaagaaagattagttaataatattaatcaagcatgggaaccagtacacgtaagtggaacaaaggatagtgcttattattattcaacatataatgctgaagataatagcgacattcatcacgataaaaagaaaattatgattttaggtggtggacctaatcgtattggacaaggaattgaatttgactattgctgtgttcatgctgctttagcattaaagaaattaggatttgaaacaattattgttaactgtaaccctgaaactgtatcaactgactatgatacatctgataaattatactttgaaccactaacattagaagatgttttaagtattcatgaaaaagaaaaaccagtaggtgtaattgcacaatttggtggacagacaccacttaacttagctgctcaattaaagaaaaatggtgtgaatattttaggaacaacaccagaaactattgatatggcagaagatcgtgacttatttaatgcaatgatggaaaaattagaaattccaatgcctgaatctggaatggcagtaaatgttgaagaagcattagaaattgctaaaagaatcggctatccattaatggtaagaccttcttatgttttaggtggtcgtggaatggaagttgtttatgatgatgaaagtcttgaacaatatatgaaagcagctgttggggtaactcccgatcgcccaatcttaatcgaccgtttcttaaataatgctatggaatgtgaagctgatgcaatcagtgacggtgaaactgtttttgttcctgcggttatggaacatatcgaattagctggtatccactcaggtgattcagcatgtatcttaccctctaaacatattcctatccgtcatttagaaacaattaaagaatatacaaagaaaattgctaaagaaatgaatgttcgtggtttaatgaatatgcaatatgcaattgctgatgataaagtatatgtattagaagccaatccaagagcttcaagaacagtaccactagtttcaaaggtatgtaatattaatatggtaaaaattgcgacagatattgttactcgtgaattgactgggcgtccttcaccagtaccaactttaacagaaaagaaaattcctcatattggagttaaacaagcagttttcccattcaatatgttcccggaagtagatcctgttttaggacctgaaatgcgttcaactggagaggtattaggaattgccagttcatatggagcagctttatataaagctgaagaaggggcgaaaacaattttaccaactgaaggaaaagttttgatcagtgttagtgacttagacaaaccagaagttgttgagcttgcacaaggatattatgatgctggatttactattgtagcaacagggaatacttataacttgatcaaagaaagtggtattccagtagaaaaaatcaaaaaaattcatgaaggtcgtccaaatattagtgatgctttaactaatggtgaattagcaatgatcattaatacacctcatggtaaacaaagtgctcatgatgatagttatattcgtaaagctgcaattaaaatgagaattccatatatgactaatattgctgctgctaaagcatcattagaaggaattatggaaatgaaaattcatggtagtcatgaagttaaatctttacaagagtatcatttagcaattaaataaaatttaaatttaagctattcccaccaaagtagataaatgagataatttcactaaatctatggaggtgggattttattgtgtttgtatcaatgattttttattattaggcttgaaaatattaatctatatcaataaatttgactcgtgataataaaaaagtataaaaatatcttgaatattcaaatgatttctactatactatacaagaataagaaaggaatgaggcatatgttggtgttttttaaagaattagtaagtgaaaaatttgatattatgaactcatttttatatttttattgttattaaacatatcagttatattgatatgtttttttatagtaattaaggaggatgaatgatgaaagcatacttaattttagaagatggcagtgtatttgaaggaacaagtattggtgcagttaaagaagtagttagtgagtttgtatttaatacttcgatgacaggatatttagaagtgttaacagatccttcttatgctggtcagtcagtcgtaatgacttatccattaattgggaattatggggtttgtttagaagaccaagagtcaagtaaaccacatgtagagggatttattgtaaatgaactagctagattgggaagtaattttagaaaaaatattgatttagaggaatacctaatccaacatgatattcctgggattcaaggaattgatactcgaaatctaacgaaaattattcgtaatattggatgtatgaatggaatgataacaacaactaaatatgaaaatcttgatgaagtaatgaaacggattcatgctttcaaagtaactggagttgtggaacaaactacatgtaaagagtcttatacaattggtactggagataaaagagttgctttattagattatggagcaaaagctaacattgctaaaagtttagtgaaacgtggatgtcaagttacagtctatcctgccagtacgccagcgtcagttattctaaaagaaaagtatgatggaatcatgctttcaaatggtcctggagatcctgaggaaaatgttcaaattattgaagaaatcaagctgcttgcaagtagtcaaacaccgatttttgcgatttgtttaggacatcagttaatggctttagcccatggtttcaaaactgaaaagatgaagtatggccatcatggtgctaatcatccggttaaagatttagaaactggtcgagtatatatttctactcagaatcataattttgtgattaaagaagattcaattgattcagcagtagcaaaaccatggtttatcaatgtaaatgataagacaatcgaaggtgttacttatcttaaagaaaatattaaaacagtacaatttcaccctgaagcatgtgctggtccattggatactgatgctttatttgaagaatttataaagatgatggagggaaaatagaatgccaaaagatagtagaataaaaaaagtattagtaattggttcgggaccaattattattggtcaagcagcagaatttgattatgctggaactcaagcttgtcgggcattaaaagaagaagggattgaagtagttttaatcaactctaaccctgcaacaatcatgactgataaggatattgctgataaggtttatattgagcccttaaccgtaccggttgttaaaagtttaataattaaagaacaaccagacagtattttgccaaccctgggtggtcaaaatgctttgaatattgcgatggcattagctgatgaaggttttttagaagaacataatgttcaaacgattgggacttcaactaatacgattaaattagccgaagatcgcttagagtttaaaaccctaatggaaaatattaatgaaccatgtgcagcctcattagttgttaatcatgttgatgatgctttagagtttgctaaaaagattggttatccagttgtagtacgtcctgcttatactttaggtggaacgggaggcggaatcgcttatgatgaaacagaattacatgatatctgttcaaatggattaaggttatcacgagttagtcaatgtttaattgaaaggtgtattgccggatggaaagaaattgagtatgaagtaatgcgtgatggtgctggaaactgcatcactgtatgcaacatggaaaatttagatcctgtaggagttcatactggtgacagtattgttgtagcgccaagccaaactttatcagataaagaatatcaaatgttaagaacctctgctttaaatattattacagcattagatattcaaggtgggtgtaatgttcaatatgcgctaaatcccgatagttttgaatactgtgtaattgaagtaaatccacgagttagtcgttcttcagctttagctagtaaagctactggttatccaattgcaaaactagcagcaaagattgctttagggtacacattagatgaaatcatcaatgcagtaacagggaaaacttatgcttcatatgaaccaacattagattatgtcgtatgtaaaattcctaaatggccatttgataaatttgttgatgcttcaagggaattagggactcaaatgaaagcaactggagaagttatgagcatttgcaataattttgaaggtgcgctaatgaaagcattacgttcactggagcaaaatctttactatttgcatctagatgaacttgatggaaaagatgttgaatttctccaaaagaaattaaaagatgttgacgatcaaagaatttttgcggtagcagaagcattacgtcaaggaattagtgaaaaagaaattcatgatatcacaaaaattgatttatggtttatcgataaaatcaaacatttagtagaagtagaaaaggaattacaaaataaagaattaagtggagagttattgaaaaaagctaaacgtttagaattcccaaatcaagtaattgctaagttaacaggtaaaactagtgatgaagtaaaaaatatgtgccaagaaaataaaattaacgcagtgtataaagtggttgatacatgtgcggctgaatttgatgcaacaactccatattattattcagtctatggtggagtaaatgaagtaaatccagctgatgataagaaaaaaataatggttttaggttcaggaccaatcagaattggacaaggaattgaatttgattattgctcagttcattgcgtttgggctttaaaagaagctggttatgatacaattattgtaaataataatcctgaaacagtaagtactgactttgatattgcagatcgcttatattttgaaccattaacaccagaggatgttgagaatattgttaatatcgaacatcctgatggagcaattgttcaatttggtggtcaaactgcaatcaaactaacaaaggcattaatggagatgggggttaaaattttaggaacatcagctgacgatgttgatgcagctgaagaccgtgaaagatttgatgagattttagaaaaatgtgaaattgatcgtcctcgtggttcaacagtctttacaattgaggaggctttagaagttgctaatcgattaaaatatccagttttagttcgtccttcatatgttttagggggagcaggaatggagatctgtttaaatgatggtgatgtaaagaaatttatgaaaatcattaatcgtcaatatcaagaacacccaattttaattgataaatatttagctggtaaagaagtagaagttgatgctatttgtgatgaaaatggaatactgattccgggaattatggaacatgttgaacgtgcgggagtccattcaggtgatagtatatcagtttatccaactcaaaagatcaaacagcatattaaagatacgattgttgaatacacaggtcgtttagctaaagctttaaatgtcatcggtttaattaatattcaatttattgtatatgaagaccaagtatatgtaattgaagtaaatcctcgttcaagtagaacaattccatatatttctaaagtaacagatattccggtggtagatgtggcaactcatgttattatgggaaaaacaattaaagaacagggatatgaatatggcttagcaccagaaaaagaaacaattgcgattaaaatgccggttttctcttttgaaaaaattaagggagctgagattagtcttggtccagaaatgaaatcaacaggagaagtgcttggaatttcaactgattatgatgaggcaatttataaagcatttattggttcaggaatcaatttaccaaagaaaaagaatattatttgtacgattaaagattctgcaaaagatgaatttttaccaattgcaaaacaatattatatgtttggttatgatttatatgcaaccgaaggaacttataatttcttaaaagaaaatgatgtaccagttagtttagtgaatcgcattagtgctaaaagtaacacattgtttgatttaatgttaacagatactgttgatttaatcattgatattcccactcgtaatgataacttaaaagatggtttcttaattagaagatttgctgtagaagcaggaattccaatctttacttcattagatactgctcaagcattgattactagtttagaaaaacgtcataaaggggatacttctttagtagatattactaaactaaaatagtttaaaacagacttagtgagattgcatcattaagtctgttttttgtaaaatataaactttgataagtagtttcttgataaaattatggccaataacattattattttgagttgttaatgaagataattaactttatgtttttttatattgaagtataattattgaaagaggtagataatatgtatacatatgaaatgctatatcggttgtgtagctaagaatctagtgatagtgtgattgcacactatttattaatgcatttaaattcattggaacagttgacgattaagaaagttattgatgatgtagggatctctaaggcttctttacatcgtttttttagtaaggatggctatgagagttttaaagatttaattactatattagatgaagaagtaaaacagaaaaaaatgtttaatattgattatcaacagtatcgttccaatatggcttggagtgctctagaaactgagtttgaagatcaccaaattagaattctaataaagacaataaaaaagctaaacgagttgttttttatggtaattcatgggagatatcatgttttaaaagacttagtttttatttatttaatcatgggatcgatatttaaatttttataatcttagagtttcttataataagattatatctagttaaaagtaatgaaattagattattttcttgatataggttacaattacatatggaagtgataaaatgaatatgaaaagatatgaatttgatgctgtaattaaaaaagtaccgaatatagatggtgcttatgttgattttccatacgatgtaaaaaaggaatttaataaaggacgtgtaaaagtcattgctacatttgatggaatcgaatatttaggaagtttagtaaaaatgaaaacccctaatcatattattgggttgagaaaagatattcgaaaaataattaataaacaaccaggagatattgttcacgtaacgattcaagaacgtgaataatagtaaataaaacaaggggtgaaaaagatgctaaaagtagagtctaaatacacaaagaagtacctattcgccatcttgttttttattataatgtcaattatatgtgtaactatttttttaactaatatcaatagtgggattaatgaaaaagttcaagaaattttacttaacgaagtgatttctcatcgcaaaagtttggaagcgacgatctctatacaatatcaagaattagaagggatatctgagtatatcactagcttaaacacacgtgatatgtcacaattgataaattttactaaagcatttgtttctaaaaatggatttgatcgaattgttgtggcgtttgaagatggaattggatatctaagtgatggtagtagttatgatataagtactagaggatattatcaagatacgatgaatggaggagctagaaatagtgaaccagtagattcagttattgatggtgagcgtaggatggctttatctgttccaatttatagtcaacatggtcaaataatcggtatggtaatgggatcttatgatgtacgggcaattagtgaaattgagttttctaatttatataataacaagggttatacttatttaattgattattctggtaattttttgattaatgatcagaagcttcataattatcaaggaaatttttatgactattgtcaggaaagtaatattttaagtaatcagcagctacagcagataaaaacagacattagtaattatgtttcaggatgtgttttgactaaaggaggtaaagaaacacgctatttagtatatgttcctttagagtcaagtgagtgggtaatttgttattctgtattagtctctgatgcatttcaagattatcagtttattatgaaatatgagacatatttgctgggagctgttgcaatggttctaacagttacggttctttatatttttattgtaaataaaaaagagcgtcgtgttttgttaaaaagagctgattatgatagtttgacaggtttatacaatcgtcggaaattaacagaggaaattaagaggtatttaaaagctcaaagtgaatttggattagcgattttagatattgatgattttaagaaaatcaatgatacatatggtcatcctattggtgatattattttgaaagaaattggacaaattttaagagataatcttggtgaatatttggtcggacgtttaggcggtgacgagtttgttatcttaattgaaaatgttcaaattattaatattgttattcaaaaacttgaactgacttgtaaccaaattgctaaaataaaaatagaagaacatccagatattgttgtcacatgtagttgtgggttagcagttgcaccaaaggatggagaaaccgtagcggaactatataaggctgcagacagtgccttatatattgctaaatcattaggaaaaaataaattggcaaaattttaaggagaagaagatgagatatacaggatttgtaatatcagtaaaagacattaatgcatcaaaaaaattttatgaagaactatttgatttagaagtttatcaggattatggaataaatattacgtttgattgtggattatcattgcagcaagattttgactggcttattaatatagagaaagagaagattattgaaaaagcaaatgatcatgaaatttgttttgaagaagaaaattttgatgcatttttaaaaagattatctgtgtacccacaaatagagtatcttgatgatgttatagagcatagctggggtcaacgagtagtccgtttttatgacttggataaacatattattgaagtaggtgagtcgatgaagatggtaattaaccgttttattgatcgtgggatgacaacggagcagatttcaaaaaaaatggatgtgtcagttgctgatcttaaaaaactgcttaatgattaaaaagaatattaaagtaataaaagaccgtcaatgatcttattttaaatctaataagttcattaaacggtcatttttttctaatgatttaaagacaagtgctccgataattaaaacaattaattctccaacagcaacatagattgcgtttattacatatggaatattgaaagcataccataattcagccccaataatcattcctgttataattgctcctgctccagcagctaaatagcgatttttaatcaagtacatagcaatacatactataatcgtacttaaagttccaaagacaatatctaacattcccattggtgaaaatagattagcaataatgcaaccaatcgttaagccaggaatatagcgtcgattataaaatgctaaaaaaacaattatttctgatagcctaaattggatttctgaatatgcgatgggtgagattgctaaagtgagtacagcataaacccccgcaatcatcgcattgattacaaccagttttactgaaatacctttgttcatatattatatcctttcatagtattattttcacttaaatgtcacctcattgaaaacatggatattatatacgattttaagtaaaaagactagtctttctgtataggaatatgagaattaaaatattttatataaatacaacaatatttaaaattaaatacttgctctttttatcaaaaagattaatcctaattaataaaatatgtgatacgataataatgatgtataattacgaaaggaaggttaacatgtcacatcgtatagtggtgcgcaaacacgaaaaaattgattatcagcgcagtactttctttacacttgcccacacacattatgataaagattattatatggaaaatcattggcataatagtattgaaatcacttatgtagtaaagggcttaaaggttcaacagatggagaataaagaagttattgcaccagcaggaactttgttattagtgaattcgggagtaattcatgatgttgatgtaaagaagggattagaggggattgtcttattgattgaccgtaattatattgaccatgtttgtccacaatgtattgaacgtggctttagcttggaaaaagaaccattagctaaaaagaaaattgtggattatttattcaaattagtagaagcctatgaaaataataataaagttaaagctaatattattgttttagaaattattagtgttttggctgaacagttaatgttagaggggcattatattaaagaaaagcatgatgatgaaagttatgaattagttatttcgattactgaatatattgattatcattatgctcaaaaaattagtttagatgatttagcaagaatgacatgctataacaagacttatttatcaaatatttttaagaaaaagacaggtattactatttttgagtatttacgtaatgtcagaatgcagcattgtttatatgaactaaaacattctgatgatacgattgtaagtattgctttaaataacggatttgcaaatattcaaatatttaatcgtgtatttaaagaagtttatcaaatgacaccaaagcagtatcgtgaaaagaataagaagtaaagattaatgaagattaaaacaaataaacaacaataataataaaatccgccatgctaagataagtgtcaaagaggaggatgttatgaaaaagattaaaaagtttttatcatcgctaattgcaataatgatagttgcaacaatggttacttctaatctaagtgcattagaggtaaatagctcgtttgttcaaaatacgaacacaagtaatacatatggttatgtaaattatgaaacagatcaatttgaaacttatagtaaggtttcaggaagtgctgggaattatacaagcattgcttcaaaagtttataaaccattatctggagatactctaatcgttgtttttcatggtaatggagaaggtggtgttgatggggttagtaataactactcacagatagctgctaatcgtttagctgtaacttatacaactgatgaactacaaagtgcttttaagggagcttatgtattagcttttcaagcaccagattattggtataatgattatacgcaacaagcaaaaactattattgatcaagctatagcagaatttggaattaaagaagtatttgtttctggattatcagcaggcggtttaatgacacaacggatgttagcaaaatatggtgatttctttgcaggcgcattaatgtcatgtgctgctattgctaaaaatgaccaatatgttgaaggtctaggtggaaattacactgattctactgaatatttagatgctggtgatgcttatacaagtggtgatacctttaagaaaccagttgatttcaatcaatatttagctaattatgacgaatggctagaaaatattgccgtaagcaatgttccgattttcatggtacattgttattatgatacaacaatctattatggatggactcaatatgcttataatatgattaaatcctatcgtgatgacagggggcttgatggagatatctactgtggtttatttgaggatgtcagttatcctgatgaaacatatagcagcgctcactggtcgtggatcaaaatgttgaatggtgatgtttatgcttcaactaatgcgagtttagatacgattacatggtttaaatctttatcaacttcaactaatgattatcaattaaaaacagttactaatcctgtagctggagaagcagcaggtgacaatatttatgcttataacttaattgctacagtaactaatagtggtgaaaaaataacggctcttgaaattgatatgaacggtaagaaagttgatgcttctaaattaacaactgagatgtttaaaataaccggatacaatagtgatgctagtggtttggttaaaggtgatgttcagtcttatggaatttttggaagcgaagatgagcctgtagatattgaggtggctagagtatcagtaaatgaaaagggtaatatcatattagatttagcaacacagaatggagtattaaattatacttctttggctcgtaatcttgcgactaagattagatataaactagcatcagtagctctaccaatgattgttgaggataattcaacaacaaatcctgatgataaacaaacagctgttaaaacaggcgatgatttaaatgttttaggtgctggaagcttaatgattatttcattgatgatggtagctgtatctaaacgaaaatttgattaagaaaaaagttctacatttttgtagaactttttataactatttaaataaacctaagttaatacaagcgttataaataccatcatcatcaatactgtcagtgacaaaagttgcaatgtttttaagatatgcgtcaccttgtcccatgcaaatagagatagcagcatgattaaacatctcaacatcatttaaagaatcgccaaaacaaatatatttatcaagattatattgttttaagataacttgaataccagttgctttagttgcatcggcatgagttatatcacaatatgtagagactccgggtaagatatgtaaaccttctaattgtttaaatggcgcataatcatatccctttggtccataggcaatcatcgcttcaactttttggttttgataaatgcctaccggagggatgatagagttaaaaaatttacgtgcagtgtaaacattttcatcgggctcttgggtaatgattcgatgctccatttttaaagcgagtggaatattattatctttagcaatttttatacaacgatggactatttccggggaaataaccaattcttcgacgatttgaaaatttttattaagcacagtttgaccattattacaaacaaagccgtcccaattagcaatatcaacaaccccggtacgttttaatgaattaacagcacgaccagttgcaattccaattttataaccattctcttgtaatttttgtaatgcttttttagttgatggagtaacctggtagtcatggttatccattaatgttccatcaacatcaaagaaaatcattggtttcataagctcccccttttcatgcgtatattttagcaagcatacctatgaatgtaaacaaaaaaggaatatgactaaacatattccttaattaaattattttccgcttggtaaaaatggaattaatcccgctgctacggcactgattggcattgattgaagaactacttttcctggtcctgtgacaaccgtattaaaaaaaccttcaccacctaacagtttatttttaactcctttaacgctttgaatttccatcttgcatgtagcatccatcatagctagatatcctgtatcaataaccatttgttgaccaggtaataaatcgtaagaaatagctgaaccgtcaatttctaaaaagacagtacctgtaccgctgatcttattcataatgaatccttcaccaccaaaaattcctgttgccatttttttattgaaaaaaactgacatgtcaattcctgaagttcctgctaggaatgatgacttttgtacaataatttcatgatttggattaatttcaacagcttcgattgaccctggaaaagaagatgcaaaagcaatcatgccgtcttctttagcatgataacgattttggaacattgtttctccactaaacattcgaccaaatgctttaccaaaaccaccacttgttgtttccatttccataacgggatccatccaactcatggcaccgctatcagtaatcattgattctcctttttctaagtgacaaatcactacagggagattgtcccctttaatctcgtatttcattttatttctccttatttattgcgatacaaactggtgcaggaatagctaaagttgaagctgttctaactagttgttcgcttttttcatcaaatgttaataactctaattcatcatcgtcttgcgcaccaacaattaaatatttatcatcaataatattaaaatcacgaggatttttaccagtatgaaccatatatagtaatgaaactttaccagtttcttggttgactcgatatagaacgatgctatcatgaccacggtttgaaatgaataaatgatttcctgtcgcacttagacgaatagcgctagcgctcgaaaaaccgtgaaaatgacgaggcgttgtatgaataacttgaattagatttaaatatttatcattatatttataaaccattaaattattagaaatctcatttactagataagcaaaacgaccatctttagagaaaatcatgtgacgtggtccagagcctggtaccacatttaaagtatgttcaacatcttcttctaattttccatcctgataagtatacatgattactttatcagctcctaaatcaacagcataaacaaattccttatcaggggttattccaacataatggcagtgtggtccagtttgtcgttttagtagatcgggaccaagtccagtatggtggatagcacagattttttctttaataaaattattttctaataaatatgatgctgtggaaccaacatgatagttagctgcaaaaagatatcgtgaattatcactaacacataaatgggtataagaacgtccattagaattataattattgttgggaataagttcttctttgtgaattgaaaaacttccaattccacctccattattaagtcgactagcatttttgtaagctacgtataaaatattatttttagtgatcatgtaagatggataatcatgggttactatatgttgtaccagagataatttttgattttcttcattaagatcaataatgtaaattcctttattgtcacttttaccataactagatacatagaatgttttcatgttaaaacctccttgtttttattttatcataaattattaatgaaagggttttattataccatttttgcaataaatttttattcttaataaatgttttattaactactaacctttgaatttgattataaatggttgattataaaaataaaagatatttagtaatttatttgtgtagacaatatatattgtttggactattatagtaaataattaatgtatttgtttataattaaaagtgaaagtgagatggtataagtgaaatcatatcagaagatagaaactgctgctaaggaacttgttaaaacaaaaaatttgagaatattactgttaaaatgatctgtcaatggcaaatgcttcgagaaaaactttttatgcattatatcatgataaatatgaagtgattgaacgcattgttgttgataatgtgattagtgatttaaaaggaatgctagaattgttaggaaaggtggaattaaatcaaccgattatattagaaaagatgtatcaacatttttatgacgaaaaagagttttatgtaaaggctataaatattgaggggaataattctttagaacattgtcttttatattgttttgaggaaattaacttagagatattaaaagatgtagaaataagtttagtcgaaaaggagtatgcagcttacttttttgctgcttcacaagttatgttaataaagaaatggttgattaatgatttagaacttacaccacgagagatggtgttaagttctcataaatgggcagttaaagctatggttaataattatttttaaagaaggtgacaaatattaatgattgttacttttttagttacgcttagtcttacctgaatttagcgatagaatcttattgttaagatcactgaaaacttagctatggccgtgactggtttagaagaaattattgaagtacctgattaagaaatacctaacaataatggcaaacaagatatccaaaattattgggatctacaagtgatgggattaagatggtacctatatagattatggcaattaatgtaattggggtgatagtggtgaaaaagaggaagaaaagctaaatgttggaagtcactttgaataatggtttttaaagaaaaaaataatgattgtaatagttcttcacctttacctcaaacataaaatgttatataatgagtaaaataaattggaggaaagaaatatggatgagaacttattattaacattacttcataataatgcacgtatggacgttacggatcttgcgatggcattaaacgaaacagaagataatgttgttgataccatcagccaattagaaaaggataaagttatctgcggatatcatacgattattaattgggatcgtacaaacgttgataatgtaatggcattaattcaaattaatgcaactcctgaacgtgagtatggttatgatcgtattgctaaaaagatctatgcattcccagaagtagatacaatgtatttgctaagcggaagctttgaattcgttgcgattgttaaaggacacacaatgcaagaagccgcccgtttcgttgcctctaaattggcaccattagaaggggtaactggtactgcaacaatgtttgtattaaagcaatataaaaataatggattaagttttgatgatgatgacaaagaagctgcagaaagattattggtaactccataatggatttcaataaggtattaaatgatacagtaagagaaataccacctagtggtattcgaaaattctttgatttagctaatcaaatggagggagttatatctttaggggttggggaacccgattttgatactccatggaaaattagagaggctgcaatttattcaattgaacaaggtaaaaccttttatacagctaatcaaggtttagtagaactgagaaaagaaatttgtcgttatcaaaaaagaagatttggtttggattattgttatgataaggaatgtatcgttacagttgggggctcagaggcgattgatcttgcttttcgtgcaattatcaatcctggagatgaagtgattttattacagccgagttatgtcgcatatactccaggagttgctttagcaggtggaaaggtagtaaatattgagcttaaagaagacaatgagtttaaattaacacctgaattattagaagctgctattacacctaaaacaaaagcaatcttattaaactatccaagtaatccaacaggtggatttatgactcgtgaggattatgaaaagattgtttcaattataaaaaagcatgagattattgtaataactgatgaaatatatgccgaattatcatatgaacaaaaattttgttcaattgctgcatttgatgaaatcaaggatcaggtaattttagtcagcggatattctaaagcttatgcaatgacaggctggcgtttaggatatgtattagctaatgaagttttgactaaagcaatgaataaaattcatcaatatgtaatcatgtcagcaccgacaggtgctcaatatggagcaattgaagcaatgcgtcattgtgataatgaaattgaagaaatgcgaaaagcatacatgcttcgtcgtaattacattgttaaagcatttaatgatttaggattacatacatttactcctcaaggagcattttatgtattcccgtgtattaaatcaacaggaatgacttctgatcaattttgtgaagaattattaaaggatcaattagttgcttgtgtccctggtactgcctttggggaagctggtgaaggatttattagggtatcgtatgcttactcaatcgaacaaatcaaggaagctacatcaagaataaaaaaattcctagataaattgaaaaaataacgttaatagcgttatttttttgtattttcatgtgatacaatagtgatatataagttattggagggatagcatgaaaaatgagcagttacggaattttattaaagttgttgattgtggcagtatcaataaagctgctgaacaactttatgtttcacagccaagtttaagtcgttcaattcattcattagaagaggaaatggggaaagaattagttattcgcagtaatcggggagttacacttacgccaacagggagattgctatattattacgggcgctcaattttagaacagtttcaagttttagagaaattaaagaatttaagtgaggaatcgatttatagtaaattagcagtatcagtcgattctatttttttaagggatgacctgattttacaattctataatcacattaagtctgcagatactgaaataaaaatgattgagactacggcagaagaagttctaaataacgttagtgatatgacatctgaaataggaatagtaattctaaataattatcagttggcaatctttagaaaaatgacagaattgaaagatgtagaaatgattgtacttggaacaggaccattatatgttcatataaacgaacaaaatccgttagctaagggcgaaattatagatgctaaagaattggttagcagtacatatatccatttgcctcatgatttcttttctaatttaaatttatcactaacgattgacggcagtattcaaatcagcagttttcataaaactattacgatgagtaattatcatgctattatcaatatgcttaatcatactgatgcttttatgttggggcataaatggcaaatagaagaactgaaacattcaagaataaaaagtatgcagtttcaaaattgtaatataaataaatcattcattattattaagcgtaaaagagaaattttatcagatgctgctaaaatatttttagaaattattaacgataattatgcggatatgtagatatacacaaaaagtataactagacctaccaagataagtattaactgctttttgaatttagtattagaatataggtatagaaacaggaatgacaaattccgacacatataatataaaaaatactaaaggagaaaattattatgaaaaagagtacattattaacaatggcatcagttggtgccgtagctttaacttctgcaatgacctttgcggcatgggataatttatctgatactactacaagcaatgaagtgacatttaaacaaattaatgtggaaaaggcagctgatattgttcttaccgagccagttgctagtgatttaactagttcttacgtacctagttcaagtggggaagtaacatttaatataacaggtatagatgcagctgatttaagtggtaaggaactaaaattagaaccagtagttaaagctaatgatacagcaatttcaactggctatactttagaaatttatgatggaacagaggaatcggcagaaaaagtcgccggtaatgttgataaaagtcttactggaactaatacttacaaagtagtagttactgcaacagatgataaaactggaactgatgcgttagcaaataaaaaagtaactgttgaactaaaagcaacattacaaaagactattgtttaatgctatcaataatggcatttttgtccaagtatataatataggatgtgaaagtcatgaaagaaaaggtgagaaaatttagcaagctggcatattggctgatattgggaatgatattgatgtatattgttgggatgcaattttatgctcaagagataactgattttattggatatcgcttttatgcagtcatgacggatagcatggaacctagaattccaacgtattcaatggtacttactaaaacaattgatgaaaatgaatctattgcccctggagaaataattacatttaaagttcagcggggagagcaagaaatagtgttgacacatcattttaataaaacacaagaagaaaatggacaattatattatcgaacaaatgccgagggtcgagatgaattagatctatattatacaaaacgtagtgatatcattggtaaatatgtttggcatataccattattaggaaagtttattatgtttattcaaagcaaattcagttggattctatattgtgaatttttactgatttggctaatcaataaaacaataaaagctcactgggaagaaaagggagagcttgatgatgaggttaaaataccgcgaaaattggataacgcttagttatccttttttgttttattttagttaagggaatgttaagaattagtaaagtgtatatgcttgctcaacaaagtgtaatataatgatgagaaatccggaggtggaatagatggaaaaggaattacctatgtattataaagtgggtttaaatgatagtgaagtccaagaaagaattgctaaggggcaagttaacggagttagtaaacctgtcagtaaaagttatgggcagattataaaagataatgtttgcacattatttaatcttttgaattttttaatatttgtagctttagtatttgttcaggcttggtcaaatttagtttttatggcaattattgttaccaactcagttattggaatttggcaagaagtaaaggcaaaaaaactagtagatcaattatcaattttaactaagccaacaattatggttgttcgtaacagcagacatgtaattgtcgatattaatgaagttgttctagatgatgttttagttcttgaaagtggaaatcaagtatgtaatgatgcaactgtgattcatggaatgattgaggccaatgagtcactattaactggggaatcagatccgattcataaaaatataggtgggcacctgctgtcaggtagtagtgtagtttctggaaaatgttatgcaagggttaaaaatgttggtgatagtaattatgcaacaactattgttaaagaggcacaaaaagttaaagagaagaattctgaattaatggattcaatgaataaagttacaaaagttactacttttatgataatcccattgggaattattttgtttgttgaagcaatgtatttacgacaagatacgttatttaatgcagttgtctcttcggcagcaggattattaggaatgttgcctaaagggttagtcttgttaactagtgtgtcgttagcaaatggagtgactcgtttagcaagacgtaaagtgttgattcaagatttatattcattagagacattatcgcatgttgatgttttgtgtttagataaaacaggaacaatcactgatggaaaaatgaaggtcgaaaaaacatatacgttagaaacaactcagaattttaaactcgatgaagtaatgggctcatatatgcgtgccagtgatgataataatgcaacttttcaagcgatgaatagctattttggagaaaataatctttatgaatatgttaaaaagatcccattttcttcattacgtaagtggagtgcgattgaatttaaaggtataggaaccatcgtcgtaggagcagcagaaaaaattatttctggtgaactgcctgaagatattcatgaattaatgttgcaaggaatgcgtgcgattgccattggttatactgaaaagactgttgatgataaagaagagttgccacgattacaaccactaatggcgattattttatcagatacaattagaaataatactaaagaaacattagaatattttcatcaagaaggaatagatgcgaaaattatttctggtgataatgtaaatacagttatggcaattgctaaaaaagcaggggtattaaattatgaacgttgcattgatatgtcaacgataaatgatgatgaaattcaagaggtagttcgtaattacactatttttggtcgggtaactcctagtcaaaagaaaatgattgtcgaagctttaaaaaatgatggtcatcatgtagctatgacaggtgatggagttaatgacctgttagcgttaaaagaagctgattgttcaattgcaattgctgatggaagtgatgcttcaaaacaaatctcacaagtagttttattaaattcagattttacatgtttaccagatgttcttctcgaaggacgtaaagttgttaataatgttacgcgtgtagcgggtgtattctttatcaaaacaatttatacgattttattatcgttgttttgtgtaatcagtaatactgccttcccatttattccgttacaaattacattaattgatttattgattgaagcaatgccatcgtttatgacgatttttgaagctgatactcgtaaaattactggacgttttttgcctaaagtatttagtaaagcagctggtaatgcactaagtattgtgattttattcattgctatcatgatttttggaccaatgtggaaaataaatgatttagaactagtaacattaatgtatttagttttaggaactatttctatggcagcggtaatacgctcttgttatccttttacaatgttaagaattattatctgtacgatgatggctggaggtttttatggtgcagtattattatttagtggtttattacatttagcaccgataacattaaatttagtttttattggtttaattttatctatttttggactatttattgaaagaattattcattttgttattaagaaaagactcgcataattgttaagggattgaagactttttgctaatttaaataaatatattttattgatagctaaggaagaacattttatctgaaatggatttccttagtttttcttacgacaaattttaacaaaataattaaaaaccaaaataacggtttttaattagcttatttttggtataaaaattttttaaattactataatagaagtagttaaaggagtgatatcatgaaaaagcaaagttatcaaaaagttatagataaggatattattgaagttaaacagtatttattggatataagtgaaggatattggatgcaggatatccatgatcttattaatataagtatggatgttaaaattattcgcaaaaaattaatgagacgtaaggatttagaattagcagtatttagtaagataaaaaaactaattgatcaggctcagggtttaaatgagatggaaaatcatttgatcatgatgaatcttttattggataaacattatagtccgatgttgacatataaatataagttattaaattatattattgaaaatggtggattttcaattgaaacgtattgtttattaagacatctaattaagtttactaataataatcttaatgattttatcatggctttggctacacgtttaaactttagtaatgaacgttatcactatcttgcaagtcatatcttattattagaaaagcaatataaaaaagtatataatcatcttgaatacattacaattgatgaaagactgggacgttatttaccggcgttgtataactttagtccccgattatacaacaaatatgctagaatgatgtatataccattaaatttagcgataatgtaggagtaaggaaattatgggtgaaaaactgtattatgtttttaaaatcattaaggaagctagggagccgattagtgctaaagatattttaaagcgtttggaaaattatgagatttttctagatattaaaacggtatatagtttaataaaaaaacttaatgatttttattattgtttgagtaataagcagttaataaaaacaattagaagaaggggttatattattgatgaggatttttttgaagatggacagctgcagctattaattgacagtgttttatttaatcccaatcttgataaaaaatcagcgaatgatttagttaataaattagctttgattagttcggttattcaaatggaacgtttaaatacggaacatcaaaatgataatgaattaacatatgatctattattaaatttaactacggtaatcaaagcaattaataaccacaaaaatattgcttttaaatatattagttatgatatcaaagataatgctcttcaagaggtataccatactaatggtaatcttaatcctgaaacatatgttatttccccatataaattgattcttagaaattctaattattatttgattggttattttgataaaagaaaagatagtttaagtgtttatcgaattgatcgaatgcgtatcgtgagaaatcatagcagtagttatgaagatattcaagatcgtttcgatatggaaaaagaatttgaaaataatgttaatatgtatgttagtaatgaacgaatcgatttaaagattgcttttgaatctagtgtactaagagaagttgttaatcagtttggacaagatattaatgtaaataaatgctttgatggtcgaattgaagcatttattaaagatgtggctttatcagatggtttaattggctggataatgatgcttcaagataaggttgaagttgtttttcctttaagtctaaaagagattgtaaagacacgaataagggctatgttaaggatatatgaatagagaacttgagggttctcttttttctttacgtaaacttaacataataaatacaatttattgatatatcgtaaattgcaatttgattattatataggtgtcttaagaaaagataaagaaagggattattaaatatgaaaaaagtattcggagttttattaacattagtattatgcttagggcttactggatgtgggggatctggtgatgattcttctgcaagtggaaacgatgtaagcggaaatgttagccttaacgggtctacatctatggaaaaattcgtaaatgctttaaaagaagcgattactgaagaatatccaaacttaacattagaaccacaatttactggttcaggtgcagggattgaagctgttacaaatggaactgctgatatcggagattcttcaagagctttaaaagatgaagaaaaagcaaaaggaattgaagaaaatattgttgctattgatggtattgctgtagttactcataaagataacaaagtgtctgatttaactactgatgacttaaagaaaatctatactggtgaaattacaaactggaaagatttaggtggtgatgatcaagcaatcgttgttgttggacgtgaagctggttcaggaactcgtggagcatttgaagaaattttaggaattgaagatgcttgtaaatatgctcaagaattaaacgaaactggtgcagtaatggcaaaagttagtgaaacagcaggagcaattggttatgtttctttagatgttgttgatgacacagttaaatcattaaaattagatggtgtaaaagcttctgaaaaaactattaaagatggaagctacactttacaaagaccattcgtaatggctactaaaggaaaaatcagtgaacaaagtaaagaagtacaagctgtgttcgattttatcaatagtgaagctggacaaaaagttattgaacaagttggtttaataattccagataaaaaataggagttaattatggaaaaagatatgttatctattataagtaatagaaaaacaaaatctttggtagagaaaacagccgcgataatttttcgtggctgtgctgttatgtctatcattgctgttgtctctattacaggttatatgattatttctggtacaccagctattttcaaagtgggaatactagatattctttttggaactgtttgggcgccaaccgctgctgatcctcaatttggaatccttttaattatacttacctcaattattggtgtttttttagctatttgtattggggtaccaatcggattgtttacagctatcaatttagctgaattggcaaatccgaaagtgcgtaaaattgttaaatctgcaatcgaattacttgccggaattccttcagtggtatatggattactaggaattttaattatttgtccgtttatgtataggttagaattattaatttttgcaggatcaaagactcatcagtttactggtggggcaaatctgatttcagcaattttagttcttgcgattatgattttaccaactttgatcaatattactgaaacagctttaaaggcagttccagatgattatcgtaaaagttcattggctttaggggcaagtcaaatgcaaacaatttttaaagttgttttgcctagtgctaaatcagggatagtttcagcaattgtattaggagtagggcgtgcaattggggaagcaatggcaattttattagtagcaggaaactcagttaatctgcctttaccattcaattcagttcgttttttaactacgggaattgtttctgaaatgggatatgcctcagggacacaccgtcaagttttatttacgattggattagtactatttgttttcatcataattattaacttgatcctaacatttattattaagagaggagatcagcatgaatagtatctttgaaagaagacatcgcagcagcgataaaatattaaattttttgatacagctttctagtgccttgtcagtgctgatcttggttgtatgtattggatatattttatatcgtggattaccatactttaatttttcatatttaattaatactactagtattttaaaaggtacggtagggatactaccaaatattattaacacattatatattattgtaattactttattaattgcctgcccaattgggattgggggagcaatctatttaaatgagtatgcaaaaaataagaaatttgttaatattatttcttttacaactgaagtattagcgggaattccttcgattatatatggtttatttgggatgttattttttggaaatttattaggatttaaattctcaatattaacgggttctttcacacttgcaattatgatcttaccaattattacaagaaatactcaggtagctttagaaggggtaccaaaaagttatcgtgaagctgcattgggtattggagctactaaatggtatatgattagaactgtgttattgccaagtgctatgccaggaattttaacgggtgtgatcttaggaatgggtagaattgttgcagaatcagcggcgttattgtttacagctggttcagtaagtgttttgccaaaaaatatctttacacatttatcaagttcaggtgcaacactaacgattcaattatatttggagatggctaaagctaattatgaatcggcctttgtgattgccttagttttaattgttattgttttaggattaaatatgttagcaaaactgattacaaataaatttgatgtaaatagggtggattagaatggaaaataaaattgaagcaaaaaatctagatctgtattatggtgaaaagcatgctttaaaaaatgttagtctagatattaaaacaaataaaattacggcttttatcgggccttccggttgtggtaaatcaacatttttaaagacattaaatcgcatgaatgattatgttaaagatattaagataactggtagtgtggttcttgatggtgaagatatttatgatagtcgtgttgatacaacggttttgaggaaaaaagttggaatggttttccaacagccaaatccgtttccgatgagtatttatgataatatcgcatatggaccaagaattcatggaatcaaaaataaaaaacagttagataagattgttaaagattcattagaagcagctgctttatatgaagaggtaaaagatcgtttgcacagcagtgctttaggattatctggaggacaacagcaacgtttgtgcattgctcgtgctttagcagtagaacctgatgtgatcttattagatgaaccaacaagtgcattggatccaatttcaacattaaaaattgaagaattgttaatggaacttaaagaaaagtatacgattgcaattgttacacataatatgcagcaagcgagtcgtatcgctgattatactgcgtttttcttagtaggtgagatggttgaatatggaaaaactaaggatgtttttgcaatgcctaaagataaacgtactgaagattatattaccggaagatttggataggagaaaaaaatgttaagaacaaattttgaaaatgatttaaacaaattacacgtagatcttgataagatgtgtcatctagttattttagcaattgaaaactgtattgtggcatttaaatcaggagatcgtgaattatgccgtgatattttagctggagacaaagtgattaatgatatggaaagaacgatagaagctcgttgtctatcgttaattttaaaacaacagcctgtagctagtgatttaagaaatgtgtctacagctttaaaagtcgttacagatttagaaagaattggtgaccaaggagcagatattgcagaaattttattagatacagatgtaacctgcccttataaaatggttgaacatatacctaatatggctcatcttgctaaaaatatggttaaacaatcaattgaagcttttcatcagcatgatttaaaaaaagcttcagaagtaaaaaaattggaagatgatatggatggactatttgaagaagttaaggtagaattaatacaaatagtaaatgagtcaaaggaaacgatcgatttagcgattaacttcctaatgattgctaaatatttcgaaagaattggtgatcatgctgtaaatatttgtgaatgggttgaatttaaccaaactggaacagttgataattatcgtttgatctaagggggactgaacatgggtgaacgtatatttgtagttgaagatgatgaaaatatccgcgagataattaatttagcattagtaagcaatggttatgaagttgttcaatttgataatgctatcgatgcactggcagaaattgataaaaaagcaccatcattagctatttttgatttaatgttaccaaaaatgagcggaattgatgcaatcaaggaaattcgtgaaactgatagtgaattacctatcttaattttaagtgctaaagatcgtgagatagataaggttaatggtttagatagcggttctgatgactatatgactaaaccgtttgggattcttgaattgcaagctcgcgttcgctcattattaagacgccatgttactagcgatattattagaactaaacatcttactgttgacaagcaaacacgtttagtaaaattagatgatcagaaattagaattaactaataaagagtatcaattattggtctatttaatggataataaacatcgtgtagttgaacgtgaagaattattaaacgaaatttggggatatgattttattggtgaatctcgtgctttagatgttcatattcgtgctttacgaagtaaattaaatgatgatggccataagtatattaagacgatacgtagtgttggatatcgtttttatgaggaaggtgatggtagtgaataaaactatttttcgctattttctcacagttttattagtcactctagttttatcaagcagtgtttcaatggttattttatcaagtcaaatgttggaaaatactaaacatgatatgctttacgcggttaagttggttgattatcaattagatgaatcacacgatttaaaagcacaagtagatgcattgaatccacttgcttacaatgatcaaactagattaactgtcattgatactaatggtgaagtattagcagatagtggtagtgaagaaattgatgaaaatcataaaggtcgtgaagaagttaaacaggctctaagtgaaggggttggttatgcaacccgttactcaagtactgttaaaagaaatatgctctatgtggcagtatttaataaaggatatatagttcgtctggctttaccatataatggtatttttgataatcttccaactttggttagaccgctaggggtaggcgcgataatgtcgttagtcattgctttattcttatcgaaacgatttgctaatacattgacagcaccaattcaggatattacgacacaggttacaaaaatgaaggattatcgtgaactagaatttgatagttataaatatgatgagtttaatatcattgcttcaaaattggaagaacaggctaaaacaattcatgatactatgaaaaagcttaaaagtgaacaaataaaaatcaatgggattcttgatcaaatgaaagagggctttgtcttattagatagtgatttaacagttttaatggttaatcgtaaagctcaaaaattatatggtcatacaatcaagttaaattgttcaatcaaagactttatttttgactttaaaattattaatgcacttgaccatttaagtgatgaacaacaggtagttgaagttgaaaaggaaaaagaattctataactgttatgtcgctaaggttgattatggggtaactttgctgtttgtaaatattactgagcagcataatgctatgaagatgcgtcaggaatttttctctaatgtttctcatgagttgaaaacaccaatgacttcgattcgtggatatagtgaattattagaaacgggagttatcaatgataaagatgcttcaaaaaaagcattggataaaattcatgatgaagtgaataatatgtctactttaattaatgatattttaatgatatcgagattagaaaataaagatgttgatgtaatcaagcatccagttcatttaacaccactagtagatgagataattgatacgatgcaagtagagattgataagaaacatttacaagtagataaagaattagaagatattacatatacatcaaatcatcagcatatgcatcagttattaagtaatttgattactaatgcaattaagtataatgttgatggtggtaaaattataattaagtcataccaatttggtcgtaatattatcattgaagttagtgatactggacgaggaatttcaaaaattgatcagggacgagtatttgaacgtttctttaggtgtgatcaaggtcgtgataaagaaacagggggaactggtctaggattagcgattgtcaaacatatcgttcaatattatcaaggaaatattacattaacaagtaaattacatgaaggaacaacatttaaagtaactttaccaatggaagaagaagttatttagtcacagtttgataactgtggctttttatttgtagattgaagtagtaataaactttttaagcgaattaatttttggtataataagactatgaaaacagatactgaaacacttagaaaacgtggctttttaacaaatacagaagccgaaccctactttttatattcaaaagaggagttattagaactattaaaagataaaacagccgtaaatcgtactgcggcgttatttattcttagaagctttgttgacattaatgaacttgatgaaatcttacttagaatgttggttaaagaaaaagccttatatactaaattagaaatatgcgatattttgactaccggaaatgagttgacaataaaaagaatgattccttatatggggacaattagaggtaatcaacatcggacgattcctgaaaaggtatcaaagaaaaaaagctatcctttgccacgggatattattgctagaactatggctaaaatgaatcctgattatttttctacgattttagaaatcattaattatcctgaagataaagtggttgcagaagcaattgatgcaattggctggatggttttttatcatcaagaattggcaactgctaaaaattatcaaacagttattcaatcatttgaacgttatcatgataatgaattgatgaaatggaaattgatcatttgtttatcggcgtttaatcaaagtgaggcttttttaaaacagctggattttcaaaatccagttgtccaagctgaaatagaacggggtttatcgctgatcaataaaagaaaaagtaaagtagtttattaaaagttaataattaggggttataattatagtattatagagaagaggaaaaagaatgtataagattataacagatggatcttgcgatctgtcaaccgaacgtgcacaagagcttgatgtgtcagtagtacctttttatgtatcaacagatgggattaatcatcaaaaggaaattgttgaattgggtatccgtgatttctatcaatttatgattgataaccccaaagtatttcctaaaacgtcaatgccgtcgattcaagattatttagatgtttttggacctttggctaaagatggtattgatattatttgtatttgtattacaacaaaattttcgggatcatataattcagcaatgaatgctaaaaatatgcttactgatgaatttcctgatgtgaaaattgaagttatcgatgctaccgttaatacggtattacaaggaatgttagtagaagaagcggttgcatacaagcagacgggtgcaacctttgaggagacggttgcatatattaacaaaattaaaatcactggaaggatcttctttactattggtggtatggattatttagttcatggtggaagagttggaaaattatcaggaattgcggctggagctttgggaattaaacctttgatcttgcttaaagaaggagaaatatttaataacggattaacacgcggacgaaaaaaatctaaacaaaagatagttgaacaaattattaattattttaaggaagataatttggaattgagtaaatatcgtttttgtataggatttggttatgattatgatgaggctgtagagtttaaaacaacattccttgctgctttgaaagggtttgatccatcatttagtgctgaggtaccaattcggcaaattggagcaacgatcggtgttcatacaggaccacatccactaggtgttggtctacttgaaaaattacaaaagtaaaatgaaaattcaattatgataaaaagacttgtagaccttatttgttaggatacaagtctttttgtatgaaattattttttaaaagttaccgatgctttgaataaatcaccatcaacactaattttaaaattacctttttgcagttcagtgaaacttttagcaatagctaaaccgaggccactaccactagtatttcttgaagtatcaccttgaacaaaacgctcaactaattcatcttcgctaacttttatttcatctgctgatatatttttaaaagtgattgtaacttcatcatcactattgtcaatatcgatataaacacgtgtattttctaaagcgtattttccaatattcattaagagattttcaaaaatacgatatgtttttaaactatctaatgataaaataattttttcatttggaaaagcagttttaaaaattaggcttttttcgttaaatttatctattaattcaaacttagcttgctggatcaatgcaataatatcgacatcaacaaggttgagttttacatcaccactattgactttactaacttcaaaaagatcatcaattaagttctttaatctaagtgaattacgatctagtgtatcgagatattcttttcttttttcataatcaagttgttcgtcttttaacaaatcaatataagtaatgatggaggttaatggtgtttttaagtcgtgagagacattagagattaattcagttttcattttttgtgattttacttcctcgctaacagctttttcaaagccatctttaatattagaaaattcagtacctaaagaattaaacataccaatatcttgattgatttcaacatcaaaatcaccgtttgataaacgtttaacagcatccaatagaatttcataatcatgtttaagttcatcaaatcgttttcttaaaataataaataaaatggcagaatatactaaggcaaagaaaataccaaaggtaaagaaacaacagattattgatataattaagcagtttgctaaaacgattttaagaattgttttatttgtatcatcatttaagtcaaatctactggctttataaattatctttcttaatacattaagtaaccaaatacaaacagtattttttttaatagaattaataatcccttctttaaagaatgattttaaataaaagacagagaacatacataggaataaaaaagctgcccatgatagtacattcatcgctccaaggatcagttcacttgattcaccaaaaccaatccctgacaatttagtaatgtaatagccgtttatggtatctagaattaaaccataaattacaacgattattcctgcaaatgccaatgtaatcccaattactaatggttctaatttgattttagcgagatatttaaagatgttgatttctttaattgtttcatatggagctaataagataaataagccaacagcagctacagcaattgcagcaaatggcacaatattttcaacatttatagttcgattgtttttttcgctataccaggcaatcgtatcaattgaattgcttacgattttatggggaacggcaaagtagatagttgtatttactggattatgcaatgtactatcttcatcatactcttggagatattgaaaatatgtttgtttataattattccaaactagttcatagttttgattgccagctactaaacagcctaaagtatcatagctaaattgaccattttcatcaaagtgaatcattaaataccattgatatttttctttcaattctttattgttacgaatgttttttatatcgtcattagtattacctaagctattattattgccttctgcatagtatttaatatttttcttttcagacatcatttcacgacaatataaaatattattccgataaaattcatcactagcttcttcgttggcagtaagatattttggaataccttcttttttgctgacattgtcaagctggaagctcagagcatagatattgtcaaaaatatcataaagaatttgattacttgaaaagttaatacttttcccgttactggtttctacaacctcatagcagctatatataccaacactgctaaggagaataattacaattgttaaaattgaaaaaattattttttttctgttcattttatcacctactgtttttcaattttataaccgacaccccagacaacttttaaatattggggattactagggttaatttcgattttttctcgcaaatttcgcacatgaaccatgactgtttctgtgttgattgcagcttcatgccaaacattttcataaatttgttcgcttgaaaaaactctcccgggcttttccattagtaattcgagaatttttaattcaattggagtgactttaacagctttaccgtcaacactaacttctttggtatcaagatcaagttctagaccacccacaacatatttatttgctgcttgatcttcttgaatcttaccgatcatatttaaatatttatgatagcgtcgtaattgtgaagaaacacgcgctaggagttccattggaacaaatggtttggtgacataatcatcaccaccaatatttaatcctgtaattttatcaatatcttcagatttagcggataagaaaataattgggaaatcataattttcccttattttcattgtcatttcaattccatccattactggcatcataatatctacgatagcaagatggatatcatatctttccaccatctctaaaccagctttcccgttattagcaatatatacattataaccttgtgattttaagtatatttcaatggctttggcaatttcaatttcgtcttctaccactaatatattatcttgattcatcctcataccctctttcataatattaattataaagccaatcattaaagaatagtagaaatgatttcaaaagattttctaaagattttttttcttgatgtaacgcttatagctaagaaggccaaaaatggaaataattccagtaattacaaaaataaatattgtaaaacgataattttgatttgagatagcgttgccccctattgtacttgtaattacagatgggattctagcgatactagtaatgaatataaaacttgaaagttttaaacgcgtaaaaggtgcaaggtatgttaaaatgtctttaggagtgccgggaataaagaagatgacaaagaggataatttcaagatttttttctttttttaaaaatgaaatttcattaaatttgttagtatcataaaaatgattaactaacttgatgccatatctattaacaatagcatagataacgatagtaccaataatagcaccaagtaaacaaattgccatcccttcaatagttccataactaaatccggcagcaatctcgattatttcacctggtaaaaaaacaaaaataacttggattgccatagcagcaacaagaattaattttccccaactaccaaattcagttaacttttctttcaattcaataggatcatttaaaaagttttcaaaaaaatgataaagaactagacacagaattgtaataattatgaaaccggttattaaaagcgaaaggttttttttatgctcatttagtttatccatctttttcacctcgttattagtatagacaacgaatctaaaacataactagcaaaagttgaaaagtgattctaaagaaaacttaaagataatatctctatcttgattttctttaccgataaaataagtaacagttattatgctataatacaagtgtttaaatatttgaacagggaggatgaatcgatgaaaaatacaattcaagatagcgaatctttgagaaaacaatttttagcgagtcaaaaagtttttaatgcacttggtgatgagacaagaatgtatttattattgattatgcttgaaggtccatgtgatggtagtcgggtaattgatttggctcccaaagtaaatctttctagaccggcggtatctcatcatttacaaatattaaagcaggcaggaattgttaagacgcggaaagttaagacttgtatttattattatttagaaccgcagcattgtgaaattgataaactgattaatttatttcagcatattaaagagattatgaataatgtatcaaggtgtgaaatggaggaagagtaatggaacttttagaagcagttcaaaaacggcattcagtcagaatgtatcaagatagagaaattccagattctataaaaaaagaattattggattttattaatcaatgtaatcagacaagtggtttaaatattcaattgattttggatgaaccaaaagcctttgataactttatggctcattatggtaaattcagtggggtcaaaaattatttggcattaattggaaaaaagagtgtgaaacttgaggaaatgtgcggttattatggtgagaaaatcgttttaaaagctcagcagcttggattgaacagttgttgggtggctttgacatacaagaaagttaaaagtgcctttgtgattgacgatgatgagcgtttatgttgcttgattacacttggttatggtattgataatggagctacacataaaattaagacgattgagcaagttagtgaagttactggagatatgcctagttggtttgaaacaggtgttaaaactgctttattagcgccaacagcgatgaatcaacaaaagtttaagtttatccttaatgataatactgtcaaagtaaagccgggtctgggtttttatacaaagctagatttaggaattgttaaatatcattttgaaattggagctggaacgaacaactttatatggcaataaagctggaaaaatccagtttttttattaattataactttcttaaatcaaattacttgaaaaagtaaagttactatgttaaagtgtaaatgtaaggaacggaggaactgaaaatgaaacagtatgatgcaatagtaattggttttggaaaaggtggtaaaacaattgctggtaagatggcaaaattaggaaaaagggttgcaataattgaaaaatccgctcaaatgtatggtgggacatgtatcaatgaagggtgtattccttcaaaatcattaatcactcaagcagaaaaatataattatcatgatgcgataattaataaagaggatttaattactaaattacgtaataagaattatgcaaaattagctgatttacaaaatgttgatgtaattacagcaactgccaaatttgtggatgaccaccatgtagctatctgtaccgaaaatgaagaagaaataatttttggtgacctgatctttgttaatactggagctactccagttatgcctccaattaaggggctagcaactgctaacaaagtatacacaagtgctagtttgatgaaattagaagaactgccaaaaaccttagcaatcattggcggtggatatattggtttagaatttgctagtatgtatgcgcgttatggtagcgaggtaacagtatatgaaagtaatgatcgtttgattgctcgtgaggatcgggatattgctgaagaaattcaaagaattttagaaaaacaaggtgttaagtttgtttttaatgctaatattcaagctcttgctaatgaaggcgaagaagttctagttacttataatgaccaagtttcacaacgcttcgccgggatattgatggctactggtcgtaaggcaaatacagctgatttaaatcttgatgctgcaggtattgaggttaaccaacgaggtgaaattgtagtcaataagtatctgcaaacaacaaagaaaaatatttttgctcttggtgatgtaaaaggtagtcttcagtttacttatatttctttagatgattcaagaattgttatggattatctatttggtgataaaaagcgttctactttaaatcgtggtaatattgcttattcggtatttatttcaccaactttttcaagaattggtttaagtgaagtagaagctaaagctgccggttatgaagtgattgtgactaagttattaacagctgcagtacctaaagctaatgttctaaaaaaaccagaaggattgttgaaagcgatcattgataaaaaaactgagcgaatcttaggttgtgtattgttatgtgaacattcagaagaattaattaatttagtaacattagtgatgaataatgatttatcttacaaggtcctaaagaaccaaatctttacacatccaacaatggctgaagcgttaaatgatttgtttgatttataaaatagaaaaaaggagaaaataaaaatgagtaatgtattatatccaaataaacaagaatttgatgaattaatcaaaaatgaaaaagtattagtagatttttttgcaacatggtgtggaccatgtaagatgattggtcctaatattgaaaaactagcggaagaaaatgctgatgctacagtgataaagattgatgttgataaacatccagaaattgctgcggtatatggggttcaaacaatcccgacactaatagcctttaaaaaaggacagattgtaaatcaaaaaattggatttattccctatcctgaaatcttagcaatgattacaagttaaaatggcaacacatataagtcttgcattagtttttgttgaagggttagtatcgtttctttctccctgtgttttaccaataattcctatttatatgggctatttagctggtaatagtaacgaaaaaagaaactcaaataaaaaagtattattatttacaatcagctttatctttgggatacttttagcaatttttctgatgaatgcgtcaataaatttattacaaagttttttaaaagaacacatgactttatttgttcgaatcggcggtattcttatcgttttattaggaatttatcagttaggatttatcaaaataaattttttacaacgaactttccgtttttctttgaaaacagataataaaatgaatgtgatggtggcgtttatcatgggatttacatttagttttgcttggactccttgtattgggccagcgctgtcatcaatcttacttttagcagctagttcaggtgatttttggtatagtaattttctaatgattatttatgcttttggttttactttaccatttctagttttaggattgtttacaaataaagctttaaactggttaaatagccatcgtgatatagttaaatatacaactaaaataggcgctgttattttgattatctttggtttgatgatgtttagtggcaaacttaatacaattagcaattatatgtcaccttcacaagggcaagtatccactaaccaagctgaaaatagtgatgattcggttaattatggcaatgctttattgaatcaagatgataaaccgattagcttagctgattatcatggaaaggtagtatttttgaatttttgggcaacttggtgccctccctgccaaagagaaatgccggaaattcaaaaactttcagaaaaatatcaaaatagtgaagacatagctattctaacagttgtaatgccaggaggtcaggaaatggatgctgctggaattaaaaagtttttaaaagaaaaaggctttactatgccagttatatttgatgatggtcgtttaagcagtagctttcagattacaagcttaccaacaacatatatgtttgatcgtgatgggaatgtatacggctctgtagttggacaattatcgagtgatatgatggaaaatattattgaccgaacgttaaaaggcaagtaagatatgattgaactgaggtgaataaaatgaaaaagcaatatgatctttgttgtaatatcgctcaaacattaaatataattggtgataaatggacattattgattcttcatgcggtaaaagaaaaaaaacatacttataaagagattcatgagtcattaccaggtatccctacaaatttattatcaaatcgacttaaggagctctgtcaagatgatttattacaatgtgaactatattcaaaacatcctccccgttatcgatatagtttaacagttaaaagtattgatcttgatgatatttataatgctttgattatctggggtgatcgtcatttagataaaagttataaatgtattagccatgatggatgtcaaggtgaaatcgagattgtttatcgttgtaaagaatgtggtgaaattattaataaggaagatttaaaaattgctcccaaagaataatatggttatagtcaaatgagtttatttaacttatttaggctatggcctttttattttaatgcttttctttatagaattagctataatagaagaaagagtggtgaagataatgagaagttcaataatgaagaaatcaattattgttgcaataatactattaattctctttggaactctagcaactttgtatattaataacttgtcagataatctgtatagtgaaactgacgagtatttgaatgatttaaccaatcagacagctaaagcaataaaaaaccggatcaatgaaaatttgacccaattaacgacgataagtttaattattcaacaagatggaattcttcaagaaccattacttgattatctaaaccagttggcacaaagggatggggtaaagcgttttggtatagcagatttacaaggaaatgtagtaacctctgatcatcagacttttaatatttctgatcgagattattttaaagattcattaaatggtaaaactgtaacctcgaaaagtattactgattatacggatggtgaggcaatcaatgtttattctgtaccaatatataaacataatgaagttagtggggttttgtttgctactttttatacagataagttatcaagtattttgtcgtctgcaacttataataatgttggctatgcatttatttttaatgaaaatggtgatgttgttttaagtaataagaagacagatgattttaataatattgaatcgttgaatggcattgatcttaatgatatcgatataaatgggaagggcataataaactttcgtgatgaaaataatactcttaattatttgatttatgctaatattgaaggtaatgattggctagttgcttctgtttttcccaaagaagctgtaactgggaagtttcaaaattttattcaaacagcttatcttacctggcttataattggggttggcagtgcagtcgtagttgcttatttttattttattcaagggaaaaataagctgcaaattactaaattagcttatgaagatgagattactggtcattataattactatcggtttattgaatattgtcaaaatatcaatcatttatctaaatatgttttagtaaattgcgatgttaaaggatttaaatggtttaatgaaatatatggagaagagattgctaatagattattaaaacaaattatcatttgcatagatactcaatgtcaaaatgaagaattttgctgtcgccaatctgccgatcattttgtaattttattggatagtgatgactttgaacaaatcaagaatcgtttatttgtgttagccaattatattagaggtgaatttgcgaaagaatataatacctcaccatattatttccattttggtgtttataaaattcttgaggatgatgttgacattaatttggctttcaagaagactcaatatactagtaatgatttaaaacgtttatcaaaagatgatgtgagcttttatcaagaagaagtttttcaaaaagagctttatgcattgcaaattgaaaaagagtttcaagattcgttaaaagctaatcattttaaagcttacattcaaccgaaagtaaatcttcaaacagggaaggtttgctcaggcgaaattttaacacgttggcatcatcctgagtacaatattatttcacctggtgattttatcccggtttatgaaaaaaacggaatgttggaagctcttgatttccatatttttaaaaaagctttggaacagatcgattattggaacaagtattatggtattaagataagtatctctgtcaatgtttcaagaacttatatttttaatgagggatatgtggataaattgattcatctggttaaagcgtgtaatgttaatcccgaacaagtagagattgaaatcacagaaacaacagcacttaatcataaagaagagttaattaagattttaaatcaattaaaaagttatcattttaaagtagcattagatgattttggaagcggatattcatccttgaatatcttaaaagatcttcctattgatgtagtgaagattgatcaggagttttttagaacaaatgactatacacatactcgcagtcatattattattgaagagataatccaattatgtcataagttaaaccttgaagttgtagccgagggagtggaaacgattgaacaaaaagagtttcttgaagctcatgattgtgattatattcaagggtattattattatcggccgatgctgctaaaagaatttgaagcattatttgtattggaaaatataaataaataaaaaggaactttattcaagctatggtacgctcctccttaagtagattttggttatttaccctatctacttaacaaggggcatatcaccatcgaataaaattccttttttattaaattaagcccatttcaatcattttaagtccaatatcaacagagttgtaagcagcacctttcattaattgatcggcaactacccataaacttaatccgttagggttatctaaatctttacgaacacgtccaacgtgtactaactcatctccaacaaataaattagccattggatagatttgattttcaatatcatcatataattcaaccccagtagaattatttagtagctcgaatactttatcaatatcgattggttttttagtttcaatatatactgattcagaatgtccccgaagtacaggaacacgaacacaagtagcatttaccttgatatctttattgaagatttttttagtttcattaaccattttcatttcttctttagaaaaatgattgtctaaatcaaatttatcaacttgtggaatgcaattgaaagcaattggaaaatgttttttatccccagcgcaaggtaatgttttggcaacaggttctttaccatctaagatttcttgagactggcggtataattcttccattcctgcaacacctgctcctgaaaccgcttgataagtagaaacgatgattctttcgatatcaaaatattcatttaaacgatttaaagcactaaccatttggatagtagtgcagtttggattagcaataattcctttatgatttcttaaagcttctccgtttacttcaggtactactaatggcacctcaggatccattctgaaatgactagtattatcaatattgacacacccagctttaacagcgaatggcatatatttttcagaaatacttcccccggcagaccaaaacgctacatcgataccttcaaagctattttctgttaattcttcaacagtaaattcatgaccttcaaattcaacaacttttcctgcactacgagctgatgctaataatttaatactttcaaaaggaaatttaaattggaagatacatcttaacatttctcttccgacggctccagtagcccccacgactgcaactttatattttttcattttttatttaccaacctttcctaaaaacgcttcatgtaataaaatttgtgcttttttaacatcgtcacgatcgatgtaacaagaaatatttatttctgagcaagatgtcatttcaacattaataccattgctgcttaatgtattatatgctttttggaacattccacgattatttttaattccaaccccaataaccgatactttaccaatgttaccacggacaatgatacgatcagcatttaactgtggttttaaatcattgataatatcaacgacagtaggaacatcaacatcactaataactagtgaaatatccattcttccgcctccaactaatgcttgattaaatacatttacattaacgccagcatcagcaattttttcaaataagcttcccgcactattgttggtggcatctactttaactaaagtgatccgcgcttcattttgtgaaccggtgattccggaaataattaattgatttaaattttctttcataatgcgctcatctcctataacatatgtccctttagtgtcttcaaatgaagaacgggcgtgaattgcaatattgtgactagctgctaattgaacacaacggtgatttaaaactttagcaccatttttagctagttccagcatttctgcataactgatacaatccaatttaagagcatcaggaactaatcttggatcagcagtgtagattccatttacatcactgtatatctctacttcactagcatcaattgctaccccaattgcaactgctgataaatcgctccccccgcgacctaaagtggtaattttaccatggatagaatgcccttgaaaaccagggcaaaatacgacatcagcgtattttaatttttcaataatatctttaccttcaaccttattgatcgttgcgttattaaaagttgaatctgtaacaattcctaattctgaattagtgattgttgccgctcgataaccgagagaagcaacttctcctttacaaactaaagttgaaattgtttcaccaatactagttagacgatcaatctcctcatctgttaactgctgggtattaacaattgataatagtgtatcagtagcatatggatcatcataacgacccatcgccgaaacaaccgcaacaactttattaccattattgatttctctaataatattgttgtacatggttgaacgtgattcacgcgaacgagtggaagtaccaccaaatttttggacaattatgttcattttatcccctcactttgaaaattgtgtattctgtatcaccaagatctgtagttagatctgctaactcaatttcatgagtaatgtagatgtgatcgtgtttttcagtgaagtacatttcataatcaacatctaatggcttatttgctctaagataatacttagatttagtaatcgggtagatgtttgagcagtcttcataatcatgatcccatctttctacttgggtagttttaattatatcacttacaactgcagaagcggtaacataacgacctgcacctttaccgtagtaaataacattttcaacatagtcattatcgatctctactacattatatgcatccatgacgtttgctactagttcttttttactaactagagtagctgcgacatcaattccaattccgttattaacttcttttgcctgagcaatcatcttaaaacgatatcccagttttttagcataatccatatcaactttagttacattacggattccactagcactaattttatcaaaatcaatatattttttaaatccattttgagctaaaatacaaattttatgggcagcatcgattccatctaaatccaatgctggatttgcttcaacataacctaggccatcggcaatggtcaaagcttcatcaaaatctaaattttcattttccattaaagttaaaataaagtttgttgttccatttaatataccaatgatttcttttgtgttgttagcgactaaactttctttttggctgactaaaacagggattccgccaccaacactagcttcgtagaaaatatggacatttttttcttttgctgccataaagatttctttaccatcatgggctaataatgctttattggcagtaacaacatgtttaccatttcttatagcttctaaaataattgttttagcgacagttactccaccaatcaattcaactacaacatcaatttcatgatcatttataacatcattaaagtcttttgtgtaaattaccccctctggtagatcaacctcttcaagaccacaaccatatttaatcattacttcatcattaatgactttttcgagacgttttctttcattagttaggatttcgataactccataaccaacagtacctagtccgataacaccgattttcatctaattcccccttatataataaaaatagacctttaaaataaggtcccaatataattaaataaatagcagaaccaatatattattgagcatgcacaataatggaactaatcgttgccataattattgcaaacatgttcattgataacatatctcggtcctccaatttcctaatttatgacatattaccacgattgtatacaatagtcaatggtaatcaataataattgaaataatcaaagttattttactttgatatgttataataagtatgtattgacttatataaataaattgtatacaatagtttaaatcacacagggggatgaacaatggaaaagaaatatataagtacacgaaaccaacaaaaagagattaatttttatcaggctatcgtccaaggaattggggaagacggtgggttattagtgccggattttgattttacaaagatggatttagatgttttatctaaattgaattatgttgatttagcaactgaagtattaagtacatttgtacctgaagaaggaaaagaattgattcatgatgcgtgtttaaatgcgtatggaaaaggattatttccagaaatcgttgtaccagtaaaaaaggctggtgatgtttatgttgctgaactattccatggacaaacggcagcattcaaggatatggcattatcgttactaccttatttaatgacgttatctttaaaacaattaaaagaggaacgtgaagtaatgatcttagcagctactagtggcgataccggtaaagcggcattagaaggttttaaagatgttgagggaacttgtatcaaagtattctatcctttggatggggtatctgcgattcaacaacaacagatggtcagtcaaacaggaaagaatgttaaggtagtaggaattcacggtaattttgatgatgctcaaagtgcggtaaaaaaagcttttgcatctgaagaattgaaagttgcaagtgatcaacataatgttttcttatcatctgcaaattcaatcaatgtcggacgtttgattcctcaaatcgtttactatttccatagttattttgaattagtaagaaataacgaaatcaaattaggagataagattaatttctgtgttcctagtggtaattttggtaactgtttagcaggatattttgctaaaaaaatgggtttaccaattgataaatttgtttgtgcttcaaataaaaataatattttaacagatttctttactactggtaaatatgatgcaaatcgtgagttttataaaacaaatgctccagctatggatattttagtatctagtaacttagaaagattggtttggtttatgtctgatggtgatggagaaaaagttcgtcaatatatggataaattaaatagtgaaggtgtttatgaagtagatgatgcaacttttgctaaaattaaagatcaatttaaagcaggatgtttaagtgaagatgaaatcttaactacaattaaaacatgtttcaatgaaactggatatttattagatacgcatactgccattggttatggtgttctaaaacaatatcagcaggagactggagaccatactaaaacagtattattatcaactgcatctccttataagttccctgaatcagtttatcaagctatttatggggaagaacttgatgtttatacagcaattgataaattaagtgaaaagactggtgttcctgtgcctcaagcattagcaggaattaaagagcgtgaagtgttacataaagaagcgattgataaaactgagattattagttttatcaaatcagaaatagaagcaatgtaggaggttagcatgaaagtaaaagtaaaagtaccagcgacaagtgctaacttaggacccggatttgacgttgcagggttggcactgactttatataatacctttacctttgaactggctgatcaaggtttaaatattactggttgtccagaacagttttgtaatgaagaaaatatgacctaccaggcttttaaacaagctgctgaaatttgtggcttagaatatcaaggcgtaaatattgaatgtagtggggatgttccttatacccgtggattgggtagtagttctacttgtattgtagcaggaatcgttggggcttttgcttttaaagataaagttgaagatcgacaagaaattctagaattagcaactgcaattgaaggtcatcctgataatgtggcaccggcaatttttggaggcttgacagtatcagtaatggaagaagataatgtattaacattaaatatccctgttaaacatgactatcggtttgttacattgattccgccatttacattatcaactgaacaatcaagatcagttttaccacaggttttgccaagagctgacgcgattaaaaacgtatctcatttagcgttgatggttgcttcattgattaatggatatgatgaggggctaaaattaggctttaaagaccgtttgcatcaaccatatcgtggtgatttaattaaaggctttaatgaaatcatgggagttttagaacaagatgaaaaagtacttggggcttatttgtcgggggctggtccaacaataatggctgttattcgtggtgaggataagatgggtgtagttcggattaaagaagagctaggtgcattaattaaagattggcaagttgtgaaattggaattagataatcgtggttacacggctgattatgaataataaaaaacgtttggaacatcaaacgttttttatttagtaaaactttttatattatcagttctttcaattagataatcaacggaggtatcatagagagttgcaagttttccaagcgtatcaggcgtcatttcgtgttgacctagttcatagcgggagtatgttttttgatcgacatgtaaatatttggctactttttcttgagtgtagccatatttagttcgaagctcttttaatcgtttgtattgcatcatatcaccgcctttttcaattatagattagtctaattaggactagaagtttttagaccaaaacggtctaaaataataaaacgctagttaactagcgccgttttttcttagtgtaatcagttttatcatcagtacgttcgatcaagtaatcaacagtggtttcatgaaatgttgcgagtttggataaaatctctggatcgatggttctttctcctcgttcgtaacgagaataagatttttgagagacatttaaatattctgctaattgtttttgagtaaggtctttatcttctcttaaatcgcgaattcttttgtaatacataaaaccaccacctaaatttattatagagtggaccttattggtctatgcataaatgtcctaaattggactaagaaaaaaatatttgcttattctttataaaagagatagattagtttataataagcacgaggtggaatatggaacagtttgcaagaattacaaggatggtaggatcttcatggatcgagtgtcttcaaaataaaaaagttgcagtttttggtttagggggagttgggagctatgtagttgaggctcttgttagaaacgggatcggcgaattagttttggttgatcatgatattattgatataactaatttgaatcgtcagttatatgcgttgcattcaacgattgggatgaataaagtagatgttgctagagcacgatgtttagatattaatcctaatctaaagatcactacctaccaacagttttatttaccagatcaaggaatggaaactatttttgaagattgtgattttgtggttgatgcaattgatactgttaaggctaaattggcactaattgaaaattgtcagcaccttggagttagagtcatttcatcaatgggaacaggtaataaattagatccaagccgttttgaaatcacagatatttataaaactagtgtgtgtccattagcacgagtaatgcgtcgtgaactaaagaatcggggcataaaaaaatgtcctattttatattcgacagaatctccgcaagaagttgacggcagtacaccaggtagtgtgagttttgttcctagtgtagctggtctgatgattgcggggtatgtaataaaagaattagtgaaggaggaagaataatggaaggaattacagaaattaataaggatgattacattgataattgtttaaaaattgtcaaagagatgattactgaagaagattttagtgatgaaatctggcttgctttaactggtgaaattatggatacatgtttatttattggtggtgattttgaagaagcaaatattcgtaatattacaaaccaatacattaataatggtggaattaaacgctttaaaaaagcgcacgaggtgttgtaatgcaacattattgtgaaattcctactccaaaaggaacgatgagaggattttttcataagccggatttagatagacatccagtatgtataatttttcacggctttaccggtcaaaagacggggacgaagttttgttatgttcaattagcaaggatgctggaagcaaaaggaatagctacatttagatttgattttttaggtagtggggaaagtgatcttaattttaaagatatgacttttaaagatgagttggcttgtgcacgtgttattctagaggaagcattaaaaatggaaaactgtactgaaatttatgttttaggacattctatgggcggtgcagttgctagtgaattagcgaagttatatccacaagtaattagcaaattagtattatgggctcctgcttttaatttaccagcagctttagattatcttactggtaaggttgagccaagttctaatggattatacgatcatggcggttatgaaatctctcagacatttgtagatgatattttggctagagatttttatgctgatctagatacatataaaaatgaattattagtaattcatggtacaaatgatacaactgtaccatttgatattagtaaaatatatgttcccaagtttaatcaacaattaaaatttgtaccaattgaaggggcaaaccataattatgatactgttgaacatattaaagaagttttaaaattatcgttggattttttaacaaagtaagtagagttatgctctacttttttttgttagttaatttactaaaatgaaagtaaattaactatgattatttactaaaataatattgacttttagtgatgaaagaatatataatgatattgcgataggattgttactattagattaggcaagacctgattaaaagaatacgattaatacacttttagtgtaaggtattttataccgtgttttcgtgttgtttttagtcaggtcttttgtattgggtaagtgggacaataaatacattaagttataatctaaatcgctattctatacgagaaaaggagaacattatggagagaagatggagttttagaaaagttttatcatctgtagcagttgcaggaatgttaactagtatggcagcagtacctacaatttcaccagtaaatgcggctgtagatcatcaatatgatctagtagagatgaaaaaagattcagttttgaaaaacggtaattttgataatggggctactaactggaatattgcagggcaaaattctggtgttgttgctgaagatggtgtaactattggtaaatcagggaaacttggggcaactactgatttgcatgctaatggacatatttggcaagaagtgaccttgaaaccaaacactaaatatacattaaaagcaaaagttaagttttcaagcgaaaattctgatgatacaattaccttggatgttaagacgggaggattaaacgctccgaaaacatttaaggataagccaattagtcctaccaacggatgggaagaagtagaattagaatttacaacatcatcagaaacagcatatgttgttggtgttgcacgttgggtagatgggaatgcaagtgactcactgaaaaattctactgtttattttgatgatgtagaacttatcggtggagacagcgaagaagattcaaattatgatattttatgggctgatgattttaatgaatcgcaattagatacaagtgactggggatatgaattaggaagtattcgtggtgttgaacagcaacactatgtaaaaagtgacgaaaatgtatttatgcgtgatggaaacttagttttaaaggctactgatcgtgcaaaagaagatcaatataaaaatcctcgtggtaatcgtcaagtaatctataattctggaagtgtgagaactcatggaaaacaagaatttttatacggaagaattgaaatgagagcaaaattaccaaaaggaagaggagcattccctgcgttttggacattaggtgctgattttacacttgatggaaagattaatggtaaacaaggatatggatggtcacgttgcggtgaaatcgatatcatggaattattaggtggttatgaaggtgaagctcgaaataaacaagtatgggggacaccacatttttatgataaaaatatcggtgatcaatgggatcaagatacaactggttctgggggaaaagcatatacaaacccaagcggtgctgatttcaatgatgattatcatgtatttggtatcaattggtcaccagataaaattgaatggtacgtcgatggagtgatttataataccctagatttaactaatccaacttggggtgaatctgcaaaaaaatgttttaatcgtccacaatatattcaattaaacttagctatgggtggaaactggcctggtgatgtagaaactaatttagcaggaactgaatttgcaattgattatgtatattatgctcaaaatgaagaacaaaaagctgcagcaaaagaatattacgatgctgcaccagaaattagtgggttaaaagatgtaacaatgcaagaaggagcaacacctgatctattagctggtgttacatctaatcgtaatagttttgtagatttttcaattgaaaatgaacatatgtttaaaaatgaaggtggattaactagtgttgatttactttgtacaggcaaagatgatctagctagtttagcaaaattaccagttggtaaatataacattcattatactgctattccaaatgatatagaatatgatggaaatagaccagaacgtgaaagtgattataaattcactcgtaaaacgatgactttaacagttgctgaacgtactttccctagtgattttaaattaaatggaatcgttggtgataaattagcaaatgtagcattaccagaaggatggtcttgggttgatccagaaacaaaaattacaggtacagcagatgaatatgatgtaaaatatgtcaatggtgaatattcaaaaacagtaaaagttgtagttaatgcagttgtcgttgataaagaaggtttaaaagctaggctagcagaagcaacagctgaagcagctaagatagatgtatataaagctgcaactattgaaaaattaaatacagtaatcgaagaagcgactaaagtattaaatgatacaagtgctaataaagaggctgtagaagaagcaattagagctttaaatacagctatagctaatcttgaaaaatatgtaacagaagcagaattagatcaagtgattgctaaaggtgaagaatttttagggaaaacagatatttatactaaagagtcactagatatattaagtactgctttagcaaaagtaagaagtgcgataacatcaggtgacaaagaagcaattgaatcagcttatgctcaattaacagaagcaattgataaattagttaaaattgatgctcctacacctgaagtgaaacctgaggtaaaaccagaaaataaacctaatacaagtgttaaaactggtgataatacatatttaggtgcaattatgacatcattgttattatctgcgggcggtttggtattgtttaaaaaaagaaaatataattaaaatagaaagatagtgctattgattatttctagcactgtctttttaaatgagttaaatattaaatagtaacagtaattaatgaataaaaataatgattaaaatggtgtttttattctagagtttttttaaaagtcaaaaatagaaaaatatatgataataaggtaatttatttgtagaaaaatcattgacattaaatatagaagtatttataatgagaatgttcttatgaactctaagtccccggtaaggatataggagaaagtaaaatgagacaaacaactatggctaatgcagccacaatcgaaagaaaatggtacgtagttgatgcaactgacttaactttaggtcgtttggcatcagaagtagcaacagtgttaagaggtaaaaataaacctacttacacaccacatgtggatactggtgattatgtaatcatcgtaaacgctgataaagtagtaatgactggaaagaaattagatacagtaaattactatcgtcactctggatggttaggtggtttaaaagttaaaactgctcgccaattcaaagaacaaaatccaactggttgggttgaagcagcggtaaaaggtatgttaccacataacacattaggtagaaaacaagggatgaaattatttgtatatgcaggtagtgaacatccacatgcagcacaaaaaccagaagaattgaagattaaagggtaagggggaaatacagaacaatggcaaatgtacaatatagaggaactggacgtagaaaatcttctgtagctcgtgttatcctaacaccaggtacaggaaatatcgtaattaacgataaaccagctaaagaatacttaccatcagacgttttattaatgattgttaatcaaccattagaattgactaacacaacttctcaatttgatgttagtgtaaacgtatatggtggtggatactctggacaagctggagctatccgtcatggtatctcaagagcattattacaagctggtactgattatagaccaactttaaaagcagctggattccttactcgtgatgcacgcgttaaagaacgtaaaaaatatggtcttaaaaaagctcgtcgtgctccacaattctcaaaacgttaattttatcaaatgtgttgtttataaaatccttgattattcaaggattttttctttttataagtaactaaacagaagtaggattaataacaatttaatcgcttggagaagttgatatgggtataatattgttatcgaagcaatagatttaagaaggagataattttatggtaaaattaaaaagaatgttaggcgatatagatgatcctacggtggttgtattaatggctttaattgagagtcaaagtgctgaaacattagcaaattggagtttgaattacgtggaacaaaatttattaagtatttatcaagataaatatcctgatgatgcaaggttaaaacatattatttgtgaaactagaaaatatttagctggtactaaaacaaaaaaagaacaaagaatgcttttaaaagaagctaaggagcttattaaagatgttgaggagacaattgtacctttggcaattgtgcgagcaattttaattgcatgtgcaacaaaagattcaccaacaaatgctctaggttatactttttatgctgtggcggcaatagtgtatcatcaagctggcttatgtgaaaataaagaaatatatgatcagcttgctaaagaagagtttaaaaaagtattaaaatcactgcaactgatagcaatagataatgaaaataatccagttaaagttaaatggtattgttaattaaaaaagaggtataaatgagaaatttttatttaatatataggtctatttttgtgttaaattgttttcatcaatattaatgttaaatcgtcaataaaaaattttttatcattactttttcataaaaattatttgcctttataattctcaatattacaaagtacttgttaataaaaagtacttttgatatacttaaattagaaaggggagagaagaaatgaaaaaggttatcatatctatatttattattttatttctatttctgggaatctcatatttttattatgtccataattcaaatgcgagaaaatacattaataattggaacattgaactatcttctaacttgaaatcactatatgagaaaaaaacagaaatcggatttcagggagacggaactatttatgaaatttttgagttagaaaaaacaagtaaacttccaaacaatttgtcttctaacaaaaatactgattttgaagcattatttaaggaatacttagttaacttgaaaattaatacaaatcaatatccagatttcaaaaatgattattattggaaatacattgaaaaaaataattccgataaattgttagtaattattaacaaaaataagacaaggctatacattattcaatctttatcataaccattataatttataagaaagaatattcaaaatctatatatttttaggtaatatttatagaaagaaggaagaatatgaaaaataaaattaagctcatccgatgtattagtgttgttacttgtatgtgcctgctgcaaactaatgtttatgcacaatcaattaatcaagaaaaaaaacttatgaattattagagcaacaaatagaatcagaacatatagatattattgcagagttagacaaattgactaatgagtatcaagaaatacttgtaattgagacacaaaataaaaatctgaccgaaattaataagattaaagatttaataagcggtttagagaaaataaaaaaagagtacatggcttctattcaaaatacaactagagcaaatcagcctaataccgctgttgctgcagtaattggttattttagcaataaaaattataaattagcctctgaattactaatacatgctactgtaaatacaaacaaaaactccacatatagtccaactaacggcagtagagttaagtctcacagtgtatttgttaaaatagcaaatggttctaagacaaatggaagtgacattttcacaaatactggaggaactgcatcaaaggattgttattatgcacttcatagttttaactatagcaaaccgacttctagtagtaaattagttaatatctcagattattatgattatgcaagtggtgattataatggaatggaaggtattgcagtaaatgcgatgtatctagcacaacagtcgggagccatcgttccttataatgtattaatttcccaaagactataattttaaatcatctactatataactatataaatagtaaatagatatgatacaaaataaagagctaaactgttatatgggggcagtttagctttaaattgtagatttatataaaataagttataatatccttatatataatcgaggttatactaatgagcaaaaataacgatattaataaattaaaaataataaatcaggctattaaagatacagagtatattacaacggggtattcaccatatcgtggaataattagtgtgttttgtaaatggcttatatgttattcttcaatgatgttacttatatatgtaatcgatatcttaaactttaaatttggtttttataactacaaatatttctacaatttgtataatgggggaaaagtattatttaatatatgcataaatttatatatttggaaaacaatatgtttaaaagaactatcggtaaaagagcgtaggtttttgaaattatggattattttccctattttgttttccatagaaataattatcccgatattaacaaactatctaaacactgatgcaatgatatctttttatcaaactatttctttgtcctatattatagttttaattgaattattttatatttattcctactttagaaacaagagaacaatgattataactttattgtttatatgttatattgttgtatcttttattcttaaggcttacatttatagttcaagagctatttctaattcttttggtgtttttatgaatatattttatgattttgatacatatggacttgtagccattattatgttatttactattatttttctaaagagggatacggatgataaaaggaagagaaacctttaaaatttttgaatcaaatattaggctaaaaatggttgcaggattatcaaaatctaatttgacttataatcagctacgagagctttgcaattgtagtgatggtaatatagcaacacatactaaaaaactagtttctgctggttttatagatgtaaaaaaagaatttgtcaacaataaaccaaaaacaacttacaatttgacagaatatgggcaaaaggaatttaaggagtacattaaatttttaaaaaaaattattgaagaaacggagaaataaaatgagaaaaataatgtttacattccttttaacactataaatgataatgttaattaatatagttccgacaaaagcttttgataatgaaactgagttagacttattaataagacggattgaccatattaatgaaatttataattccaattattacattttatctgaggaagagtttattaactcagaaattacggatactttaaagtcttatgatgattatgttaaacatttattaaattatgacttaaacgaactagaaaatgaattaatagtcaatattacagttgatagtgaaactattaatgtaaatatcgaaacatattttcgttcaacttcaggaagtagaactttatcattttataacggaaataataaaatgatattaaaatataaatatagtggtagtaaatttgatacaagctataaaccaggggtaactgttactaaggtaaatactaaaaacttctttgaaatgagtagtcatactgggtcatttaagaattctaataaaacatatagcattattgcaaagggaagagtcataactccttcaggagttgtatcaaacaaatcttttacagtaaactttaatttataagaataaaaacctgttaactaaagtgttttttagttcacttcagttaacaggttttttgcatataaacttctctggtaagatgaataaagaacatcgcgtatttctttattcatctacatgtccttctatacatgattgagaaatgagaactttgggacggatacttattttcctaaatattataacaattattttttatactgtttattttaagaattctaaatcaaaaaatcttttgtagtcaattactacttcatctttgtcctcaaaagatgctagtatatattttttattgatctttgcttttactaatatactgcatctatcatctacgtttttgtatctttcagcaaaccatttagtctgttttaaagaagttgatcaagaaatacctttgtgagcatcttctattttttctcagtacttatttcccggagaaattgcgatgttatcaaaggtaagtgtcaaagagtttgttttataaactagtacgttgtttggtaaagaaaaaagttataaaaagattattacaaaattaaaaaatataaatgattataaaactgtaatattaccaataagatgagcaattggtgtgttacagttttttcataaataagagtgaatatagacatgtaataaaacggcacatataagctcgtttagaaaaattgataaaatagacattaaaatctataatgattttagaaaaaagaaagcgcttattttttcgattgaagaggaggagagtatcatgtctaaaaaggaaaaaaattcttttgtagataagattatgggacctatggataaaatttccagtccgttaatcaaatttggtcaaattccatttattcaaggtttacaaagaggaatggtttcgtcaattggtgttacaatggttggatcaatctttttggttatttgtttatttggagctgatggaaatattacagaaaaagcattattaccgtttttaacaccatatattgaccaattgtcattaattaatagtttgtcaatgaatatcatggcaatttatatgtgtgtggcaatgggagctgaatatgctgatattaagggtattaataaaactactggtgctgtaggagcgttatttgcgttcattttattaaactataacggtatcgcagcaacttctgaaggtgtaaatgcattagaaattacatattggggtagtgcggggattgttactgctattattgcgatggcgatatctgtaaatgttattcatttatgttacaaatataacattatgatcaaattaccaagtagtgtaccaccggcaatttcagatagtttttcatctattgtgccatatttatttgttgctttaatttgttggtcaattcgtactattatgggattcgacattcctgcagtaatcacaaatattttattaccagttctttccggtgcggataacatctttgttttctgttttgcatatttctttgcctcattatgttgggtatgtggtattcatggtgataatattgtggggacagttatctctccaatgttacaaacttggatgattgaaaatacagaagcatatacagctggtttagcagcacctcatatatggattgatcaattaaatagattattccaatatgtatctacttgttggccgatcttaatctacatgtatatgagttctaaaaagttaccacaattaaaaccgctagctgtgttatcaacaccatcaatgattttctgtattgtggaacctttgatgtttgggttacctattgtattaaatcctttcttagcaattccatttgtgttaattcatactattactgctgcagtaagttatttgttaacctcaattggtttcgtaggaagatttgttataagcattccgtgggcaacaccttcgccaattttagcatatttggcaactgccggatcaattggtgcagtattattagtatttattaactttgcaatcggtatggttatcatgtatccgttctggaaagcatatgaaaagaacgaaataaaaaaattagaagagcagaaagctactgaagtagctgtttaatgaaaaggagaaattaagatgaagacttgtccatgttgtcataacgaaatactcgatgatgcaatatattgtgattattgtgggaaggaattaacaaaaaaagaagaagatgtttctagagttgttgaattaaaagagaatccacaaaaaaactatttctgccaactgggtcttatcttatttctattttcaatggttattttagatttttttatggcaactgtagttcataatactgtcggaaactctcgtattgttttctatattagcagtgttttctatatactagctttagcaactgaagggtttgcgctttttgttgattacaatgctgttaaacaaggatatagaaagaatggtaatttaggattagcgttagctactatggctttaagttcgtattttttactcgtaaatatatttggtgttattttaaaataaaggagaattctatgtattgtcgaaaatgtgggaatccgatagataacaaaacagttttttgtaaaatatgtggcgagaagattatcaagttggaacaaaaaagttatgaagaaaagtatttagaaaaaaagaaaaaaatgcaaaaagtgatttgaaaaagcaagacaaatattgtgatttaaagaatccatatgttatcccagcaattacagtttcgtgtattgggtttatactaggtgtttttccttatccagcagcatggaaagttggtacaagtctatggttaagtgttgttattctagtctttgcattattgggggcttatcatagtgtaaaagcaacccaagttaatagattttatgcacaaaaatactgttataccattaaagaaaaaacagttaaggtagcgagaatattgtcaacagtcacaattttagcggatctttttgtattcatgtcaagaatttaaagacaatttaaattgtctttttttcaaaggagaatataaatgagtatattattttttaagcctatacctcgtcctgcaatatggggacatacacttgtcaaagattattttgactattgcgatttcccggatggtatagggcaatcatggtcttttagcgcgcaagaaaacgcttctacagtttgtattactgaaccatttgttggtaagacattgcatgaattatggaacagtcatcaagaattgtttggtcatccaaacgaaccattcccagttattatttcattggttggtcctgaagatgatttaagtattcaagtacatcccgataatatttatgctttaaaagaaggttttaatagcgggaaaaatgaggcttggtactttattgaagcaatgccaaattacaatattgtttatggtcataatgcttcaagtccagaagatttaaaggattatataagaaacgaacactgggatgatctaataagatatctagatgtgaaatctgatgattttgtatatttgccggctggattgttacacgccttgagaaaagggagtgtagtttatgaaatacaacaagcaacagatattacttatcgtttttatgactatcatcgaaaagattctcaaggtaatgaacgtgaattacatttagataaagctattgaatgtctaaattatgatcaatcaaaaatggaaaataatgttcaaccaattgaaaaaaaatatgacaacattaaggaaactgtctatatatccaatgactcatttacagttacaaagttagaagtaaatggattgagtagctatatttataataactatcaactagcaacggttgttaaaggttgtggaaaggctgatggtgttgaaataaaaatgggagataattttatcattcctataaataataaagtagaatttgatggtcagatgataattatgatgaccacaaaataagaggaaagatgatgaaaaagaaagaattaagaaaagattttttatggggagctgcgttaagcaatgttcaagcagaaggtggctacctagaagatggaaagggattaaatgtatatgacacacttgttgttacacctgaacctgggattgaatctcaatatagtgatactaaggttgcaacagatcattatcatcattttaaagaggatattgatttaatggccgaaatgggcattaaagcttaccgtttctcaattatttggtcacggatacatcctaatggcgacgatgaagctaatgaaaagggattagacttttatgaagaaatgattgattatatgttatcgaagggaattgaaccagttgtttccttagttcattttgatatgcctgatcatctgatgagggcatataatggttttttaaataaaaaagttatagacttttatgttgaacatgtaaggtgtattgctaaaagaatgaatgataaagttaaatactggattacttataatgaaacaaatcttgctccatatcaaagtgatttggttgctggaactaataggcctgattatatgagtaaagaagaattttattctcaactatatattaatattcaagttgctcatgcaagggcagttttagcaataaaaaaagaaatacctgatgctatggttggtggaatggttaattattgtttgttccaacctgcaactactacttcaagggatatgattgcttgtgaattctcgcataaattcatgaattatctttcctttgatattatgacatcaggatacttaccggaatattttgtttctttcatggaaaaaagagatattgaatgtgaatttaataatgaagaacaggaggatgtacttaaggcttctaaagaattaggatatttagctatatcttattatcgttcaatgatggttacatcatatagaactattaaaaatgaatcaataatagattttgaaaacaatcttttatgggggaaaggatttgtacaaaatccattatataacgcaagtgaatggaattggacaattgatcctgatgctcttagattgtcattaattcaattacacgaacgttatcatctacctatttttattgttgaaaatggaataggtatcaaagaggaaatgattaatggtaaaatttatgatgataatcgtatagattattatcaaggacatattcaagctatgaaaactgcgattgaaaatgatggtgtagatgttattgggtatctagcttggagtagtattgattttctaagtgcccacaaagaaatgttgaagcgatatggatttatttatattaatagggatgttgaagatttaaaggacctaaagagatatccaaagaaatcattttattggtataaaaaatgtattgcaagcaatggtaatgatttggaaaataatgtagagtattggtgaggtgattaattatggttagagctcaaatttttaatcaagaaagttactgtattcaaattataagatatttatctttcttagatgattatgcaacctcttatgaaatcgcaaatcatattggaataagtaggagattagttagagatgaaattattaatgtgcaagaattattaaatgaatttggatatcgattgatttcacgtacccctaaagggtatcgtatagattttacagattatttggaggcactagagcttattaacaagattgaaaaccatgagcgtaaccataattttgattactatctatatataaatagaactttttatgttgcaaagcgactccttgaatgcgacacaggaattaagatagatgatcttgcagaagaaatttttgtatcaagatcaactttatctaaggaactgtctaatcttagagaatggtttgcgaagcatgaactgaaaataaactctaaagcaaatgtagggttgattttagaaggacgtgaagaaaacaaacgaattatattatcagatattattttcattaattacaagcactcatatattatgtttgattttttaaagagcctttataaaaataaagagatgttagattataagattatatcattgttaaaaaaatataatgtttctttatctgatacatctttaattgatttcctcgtttacatattggttatgatttcaagagctaaatctaagcatttattaactgaaattgatattccggaagagtttaacttatctattgaaatgcaagttgcaaaagagattgcattaaaaattaaagatactataaattgccagattacctatgatgagattaaacaaattgctattgaattgtttgctaaagaagataaagggtcattttattataataaagaaatgtctttaacgattgtcaatgaatcattaaaagcaattgaaaatgagttttttattatatttaaagaaccgcttttgaaagatttaaaggaagaattgtttactatggtagataagacattgtttcattgtagttttaatacaaaacagcgtaatacatactataataaagttgagaagaattactccaattcatttcaacttgctttatgtctcaagaatataatagagcaaaaaacaatccaccatgtttcgatgagcagtatatcgtcttttacaattttgttcgaaaagttcatttgtttaacaaaactccaaaaacagaaagttttatttgtatgtacgctagatcatcaaaatagagatttattatataggcagttattgtttgatataggatcgtatgttgatattgaactatttggtaatgtaggtaatattttagagtgtgacataaatcaatatgattatatcatttcaacaatttcaatggatattgatatcaatatcccaattgttttaatatctgagtttttagataacaatacaatgagatactttaaaaatcttgtaatggagacaagacaaatcgaaatgagtgaatttttatttaataagaaatattattttaattgtgttgatattgataatatcaatggaatttacgattatctctatagtgtattaaaaaaagaagtcgctatttcatttgatatatttaagaaaaacttactagacaaagatcaagtagagattattgattcatgtagccatagtcttattttttcgagtcatatgaaattaaatttaaaaaatctattaattgtatttgtactaaaaaaccctattatctataataagaaaaaagtatcaataatcattttttcgactttacaagatgattttgaaggaaatgttagaacccaaggattattgaaatcactaagatatttatgtgacaatgagcaggggtttgatcaatttattaataatcccacttatgtttgctttatcaaaggcatcaaggatataagtgtgaaaaagtgacccgctcctcattcgttggacttaatgaatgagatcgggtcattattatagacaaccatgtctattatttttcggtaattttagttgttttgattacatttaaagcttcatcaaatgatactggtcgagaaaaataataaccttgcaataaatcacagccgcattttttcataaattccatttgctccttcgtctcgattccttcagctaagatatgtaaaccaatttgattaaatgcttcaatcatttttttaataagaattgcagctttctcatctttcattgcttgccagattaggcttttatctactttaacgacttgaaaagggatggtaaggacataggtgatattagaataaccagtaccaaaatcatctagtaagaattggattccacgattaatcatatttgtcataaaatttgtgattgcatcaaaattagttaccagcatactttcggtaatttcaatttttattaattcataaggcagttgatgtttttcaataacttttaaaactttattttcaagatcatcttgcataaattgtaatactgaaaaattaatagaaacaccggtaaaatcctttttttcagcaatcactttttttataaaaagacaagttttatcaagtacctgataagtaattggagcaatcaacccattttcttcagcgattggaataaattcctcgggagaaataaacccaagtggattgtccggtaaacggagtaatgcctctgccttgcaatagctatgtgttttgagatcatagataggttgaaaataaacttcaaaactattgttttctaaacaaattcttaataagtcaagaatttgatattttcgtctaatttgtttgatcattgcagtaacacaaaaattaatattatgagcattatccttttttcctaacgaaacagcatattctaggccgttaataatttcttctttgctatgagcaactttaggataagcaattcctccagctacataactaatgataaagtcaatatttgaaatctgccatggatttttcattcgtgtttcaatcttttctagagcatttattacattctttttattataaaaatagcataaaaatctagttatccgcataaaaactggacttatcacactttatcaaggtcaaaaccactcaatttactactaatttactacttatgaatgagctttgatacgacgatttatccttgaaaagtgaagatataaagatacttccaataaaatttgaatatttaataggtagacacttcaaaaaatgaggtgtctatttttttacccgattttgaaaggaagtgaacttatgaaaacaaaaaatcaagaatcaaaaggtcgttccccactctttaagaccatcaaacattcattcagccaataaaaaagaaaggataggtaaaaatatggaacttaaatttgtgattcccaacatggaaaaaacattcggcaatttagaatttgctggcgaggataaagtcgttcagcgaagaatcaacggacggctaactgtcttatcaagaagctataatctctattctgatgttcaaagagcagatgatattgtggtggtgcttcctgctgaagctggcgaaaaacatttcggctttgaggaacgtgtgaagttagtcaatccacgtattaccgcagagggctacaaaatcggcactcgtggttttacaaattaccttttacatgctgacgacatgataaaagaataaagaaagagaggaaaaatgatgagattagcaaatggcattgtattagataaagacacgacttttggagaattgaaattctctgctctacgtcgtgaagtgagaatccaaaatgaagacgggtcggtttcagatgaaatcaaggaacgtacctatgacttaaaatccaaaggacaaggacgcatgattcaagtaagtattcctgccagcgtgcctttgaaagagtttgattataacgcacgggtggaacttatcaatcccattgcggacaccgttgctactgccacctatcaaggagcagatgttgactggtatatcaaggcagacgatattgtgctgacaaaggattctagttcattcaaagctcaaccacaagcaaagaaagaaccgacacaagacaaatagtcgctaggtagaaaggagactttttcgcatgaaacagcgtggtaaaaggattcgcccatctggtaaagatttagtctttcattttacgatagcgtcactcctgcctgttttcctgctggttgtcggactgtttcatgtgaagacaatccagcagatcaactggcaggattttaacctatcacaagcagataagattgacattccctatttaattatcagtttcagtgtcgcaattcttatctgcttgctggtagcgtttgtattcaaacgggttcgctatgatacggttaaacaactttaccaccgtcaaaaactggcaaagatgatacttgaaaacaagtggtatgaatctgaacaggtcaaaacagagggtttctttaaagatagtgctggtcgtacaaaggaaaagataacctacttccctaaaatgtattatcgacttaaaaatggcttgatacagatacgggtggaaatcacgctgggaaaatatcaagaccaactcttacacttggaaaagaaattagagagtggcttgtactgtgagctgacggataaagagttaaaggattcctatgtggaatatactttgctctatgacaccatagccagtcgtatttctattgatgaagtagaagctaaagatggtaaacttcgcttaatgaaaaacgtatggtgggaatatgataagctccctcatatgttgattgctggtggtacaggtggcggtaaaacttactttatactgacactgattgaagccttgcttcatacagattcaaaactgtatattcttgacccgaaaaatgctgaccttgcggacttaggttctgtgatggcaaatgtctactatagaaaagaagacttgctttcttgcattgaaacattctatgaagaaatgatgaaacgtagtgaggaaatgaagcagatgaagaactataagactggcaaaaattatgcttacttaggtctcccggcacacttcttaatctttgatgaatacgtcgctttcatggaaatgctgggaacaaaagaaaacaccgcagttatgaataagctgaaacagattgtcatgttaggtcgtcaagctggcttctttctaatactggcttgtcaacgtccagacgcaaaatatttaggcgacggaatccgtgatcagtttaatttcagagtggctttaggtcgtatgtctgaaatgggctatggcatgatgtttggcagtgacgtacaaaaggatttcttcttaaagcgaatcaaaggtcgtggctatgttgatgtaggaacaagtgtcatatcagagttttatactccccttgtaccaaaaggatatgatttcttggaggaaattaaaaagttatccaacagcagacagtccacgcaggcgacgtgcgaagcggaagtcgcaggtgtggactgatcttgctggctggtgtggcaatagccacgccagcacttaaccccccgtatctaacaggggggtacaaatcgacaggaaacagtcaaaaaaacattagaaaatcctttggttacaagggatttacaaaatttcagcgtatgtcaaatgggctttaaaagttgacatacgcctttttgattggagggatttttactgaatgaacaaacttggttacagcatttaaaagaaaaacgcttggcttatggactatctcaaaaccgtttagctgttgcgactggtattacaaggcagtatctaagcgatattgaaacaggaaaagtcaagccatcagaggatttacagcagtccctttgggaagctctggaacgcttcaatcccgacgctccccttgaaatgctgtttgattatgtaaggattcgctttccgacaacagacgtacagcaggtggtcgaaaacatcttacaactgaaactgtcctattttcttcatgaggactatggtttctattcttattcagagcattatgctttaggcgacatattcgtcctttgctcccatgaactggacaaaggagttctggtggaattgaaaggtcgtgggtgcagacaatttgaaagctatcttctggcacaacaaagaagctggtatgagttctttatggacgttttggtggctggcggtgtgatgaaacgccttgaccttgccattaacgataagacagggattttgaatatccctgtactcactgaaaagtgccaacaggaagaatgtatctccgtcttccgcagttttaaaagctatcgcagtggcgaactggtacgcaaagaggaaaaggaatgtatgggaaacaccctctatatcggttcattacaaagtgaagtttatttctgtatctatgaaaaggactacgagcagtacaagaaaaatgatattcccattgaagacgcagaagtaaaaaaccgttttgagattcgattgaaaaatgagcgtgcctattatgcagtccgtgatttactcgtctatgacaatccagagcataccgcctttaaaattatcaatcggtatatccgttttgtagataaagacgattccaaacctcgttctgattggaaactgaatgaagaatgggcttggtttattgggaacaatcgtgaacgattaaaactaaccacaaaaccagagccttactccttccaaaggacgctgaactggctatctcatcaagttgccccgaccttaaaggttgcgattaaacttgatgaaatcaaccagacgcaggttgtaaaagacattctcgaccatgcgaaactgacagaccgacacaagcagattttgaagcaacagtcagtaaaagaacaggacgtgataacaacaaaaaaataactcaaatacaaattcattgaatatagagaggagaacatttttatgaattttggacaaaacctttataactggtttctatcaaacgctcaatcactggtgcttttagcaatcgttgtgattggcttgtatcttggcttcaagcgtgagtttagcaaactgattggctttttaattattgcgattattgcggttggcttagtcttcaacgctgctggagtaaaagacattttactagagctattcaatcgcattattggtgcttaaataaaaccgttcttttgtggaatataagtggttttcttatgttccgcaaaggaatggtacaccaaacgaagtgcggtagggatttttgaatctctacaaagaaaggacgtgaatatatggacgatatgcaagtctatattgcgaatttaggcaaatacaatgagggcgaattggtcggtgcgtggtttacctttcccattgactttgaggaagtcaaagagaaaatcggcttgaatgatgaatatgaggaatacgccattcatgactacgagttaccctttacggttgacgaatacacttccattggcgaactcaatcgactatgggaaatggtatcggaattacccgaagaattacaatcggagctatctgctctgctcactcatttttcaagcattgaagaactaagcgaacatcaagaggatattatcattcattccgattgtgatgatatgtatgacgtggcacgctactacattgaagaaacgggtgctttaggcgaagtaccagctagtcttcaaaactatattgattatcaagcctatggtcgggatttagacctttcaggaacgtttatctcaaccaatcatgggatttttgaaatcgtctattaaatctgtcggtacattactactggcagattttctattttacggggtggctcaatcagctacccctattttttatgaaaggattgattacatgaagaaaatacgaagctataccagtatctggtctgtggaaaaggtactgtattctatcaatgattttagacttccgtttcccataacctttacgcaaatgacatggtttgtcgtgtcactctttgcagtgatgatacttggcaacttgccccctctttccatgatagagggagcatttctcaaatactttgggattcctgtggctttcacatggtttatgtctacaaaaacttttgatggtaaaaagccttatggatttttgaagtctgtcattgcttatgcactgcgaccaaagctgacctatgcaggaaaaaaagtaacgcttggcagaaaccagccacaagaagccattacagcagttaggagtgaattttatggcatatccaattaaatacattgaaaacaatctcgtctggaataaagacggggaatgttatgcttactatgagcttgttccttacaattactcatttctaagtccagaacagaaaatacaagtgcatgattctttcagacagcttatcgcacaaaatcgtgatggcaaaattcatgctttacaaatcagtacagaatccagcatacgttctgcacaagagcgttccaaaaatgaagtcactggcaagctcaaagcggttgcctatgacaaaatcgaccaacagacagacgctttaatatccatgattggcgaaaatcaagtgaactaccgtttctttatcggctttaagttgcttctcaacgatcaggagttttctatgaaaagtcttaccgttgaagcaaaaaatgctttgtctgattttgtctatgatgtgaaccataagctgatgggcgattttgttagtatgagtaatgatgaaatcctgcgttttcagaagatggaaaagctcttagaaaataaaatctctcgtcgtttcaaaatccgcaggttagataaggacgacttcggctatctgattgaacacctttacggacagacaggcactgcctatgaagagtatgagtaccatctatcaaagaaaaagctggataatgaaacgctgattaaatactatgacttgattaagcctactcgctgtttggtggaagaaaaacagcgatatttgaaaatccagcaggaagatgaaaccgtctatgtagcttactttaccattaacagcattgtcggagaactggacttcccgtcctctgaaatcttctactaccagcaacagcaatttacattcccgattgatacgtcaatgaatgtggaaattgtagcgaatcgtaaagccctatctactgtccgcaataaaaagaaagaactgaaagacttggataaccacgcttggcaaagtgataatgaaaccagctccaatgtggcggaagctctggaaagtgtgaatgagctggaaaccaatttagaccaaagcaaggaatctatgtacaagctgtcttatgtggtaagggtatcagcaaatgatcttgacgaactcaaacgtcgttgtaatgaagtgaaagatttttatgacgatttaagcgtaaaactggtacgaccatttggggatatgctcggcttacatgaagaatttttacctgccagcaagcgttatatgaatgattatattcaatacgtgacctctgatttcctcgctggtttaggttttggtgctactcaaatgctgggggaaaatgaggggatttatgttggctacagcttagatactggacgcaatgtctatctgaaacctgctcttgccagtcaaggggttaagggttcagtaaccaatgcgttagcgtcggcttttgttggttcgctgggtggtggtaaatcctttgcgaataaccttatcgtctattatgcggtgctttatggggcacaagcagtgattgtagacccaaaagcagaacgtggcagatggaaagaaaccttgccagagatttcccatgaaatcaatatcgtcactctgacttctgatgagaaaaacaaaggcttacttgacccttatgtgattatgaaaaatcccaaagattctgaatcactggctattgatattctgacattccttacggggatttcctctcgtgatggggaacgcttcccaatccttagaaaagccattcgtgcagtaaccaatagtgaagtacgagggttgatgaaagtgattgaggaattacgggttgagaatacgccactaagtaccagtatagccgaccatatcgaaagttttacagactatgactttgcacatttattattcagtaatggttatgtggagcagtctatcagcttagaaaaacaactgaacattatacaggttgcggacttggtacttcccgacaaggaaacttcctttgaggaatataccactatggagcttttatccgttgctatgctgattgtcattagtacctttgctttagactttatccatacagaccgaagcattttcaagattgtagatttagacgaagcatggagctttttacaggtagcacaaggaaaaacactatctatgaagctggttcgggctggtcgtgctatgaacgctggggtatatttcgtgacccaaaatacagacgacctcttagatgaaaaactgaaaaataacctcggcttaaaatttgcatttcgttccactgaccttaacgagattaaaaagaccttagccttttttggtgtagacccagaggacgaaaacaatcagaagcgattgcgtgatttggaaaacgggcaatgccttatcagtgatttatatggtcgtgtcggtgtgatacagttccaccctgtatttgaagaactgctccatgcctttgataccagaccacctgtgcgaaaagaggtgtaaatgtgaaaccatcaatagtaaacagaataaaatcaaactggacgctgaaacgtctaggtaaagtggcaatgacagtggctttcacacttgtgattgccatttttcttttagccatgctgggaacggtggttcaagctgcgggcttggtagatgatacggtcaatgtggcaaatgaatacagccgatacccacttgaaaactatcaactggatttttatgtggataatagctggggctggcttccgtggaactggtcggacgggattggaaaacaggtcatgtatggactatatgccattaccaattttatttggacaatcagtttgtatgtttccaatgcgacaggttacttagtacaggaagcctattccttagacttcatttccgctacagcagattccattggtaagaatatgcagaccttagctggtgtgagtgcaaacggattttcaacagagggtttctatgttggattcctcttactcttgattttggttcttggggtttatgttgcctatacgggactgataaagagagaaaccacaaaggcaattcatgccattatgaattttgtgctggtgtttatcctatcggcttcctttattgcctacgctcccgactacattaaaaaaatcaatgacttttcatcagacatcagtaatgccagtttatcacttggcacgaagattgtcatgccccattccgatagtcaaggcaaggacagcgtggacttaatcagagatagcctgttttccatacaggttcagcaaccgtggctactgcttcaatacaacagttcagacattgaaagtatcggtattgaccgtgtggaaagcctgctctccaccagcccagattccaacaatggcgaagacagagaaaaaattgttgcggaagaaattgaagacagaagcaataccaatctaaccattacaaagaccattaaccgtttaggtacagtcttcttcctatttgtcttcaatattgggatttccatatttgtattcctattaacaggaatcatgattttctcgcaggtactttttatcatctatgctatgtttctgcctgtgagctttattttaagcatgattccatcatttgatggtatgtcaaaacgagccataacaaagctctttaataccattttgacacgagctggaatcacattgattattacgacagcatttagtatttcaaccatgctctataccttatcggctggttatccgttctttttgattgcttttctacagattgtgacctttgcaggaatctacttcaagctgggcgatttaatgagtatgttttctctacagagtaacgattctcaaagtgtgggaagtcgtgtgatgagaaaacctcgtatgcttatgcacgctcacatgcaccgtctacagcggaaacttggacgttccatgactactctaggggctgggtctgccattgttacaggtaaaaaaggacagtcgggttcggggagttctgcaaggacacaagcagatcactcccgaccagacggaaaggaaaaatcaacacttggaaaacgtatcggtcaaaccatcggtacagtagctgataccaaagacagaatggtagacactgctagtggtttgaaagaacaggttaaagatttgccgaccaatgcaagatatgcagtatatcaaggaaaatccaaagtaaaagagaatgtccgtgatttaaccagtagtatttctcaaaccaaagcggacagagccagtggacgcaaggaacagcaggaacaaaggcgaaaaaccattgcgaagcgtcgctctgaaatggaacaggtcaaacagaaaaaacagcctgcttcttctgttcatgaaagaccgactacaagacaagaacaatatcatgatgaacagacctcaaaacagtctaatattcagacttcatataaggaatctcaacaagccaaacaagagcgtccagcagttaagtccgatttttcaagtccaaaagtggaacgccaaggcaataccgttcaagaaaaaaccgttcaaaagccagcaacttcaaccactacagcagatagaacttcacaacgtccaatcacaaaagaacgtccgtctactgttcaaagagtaccactacaaaatacaagaagtagaccaccaatcaaaaccgccaccattaagaaagtcggtaagaaaccatgaagttgaaaactttagtgattggtggttctggattattcttgatggtcttctcactgcttctgtttgttgccattttattttcagatgaacaggacagcggaatttccaatattcattatggaggtgtgaatgtttccgcagaagtgctggctcataagcctatggtagaaaaatatgccaaagaatatggcgttgaagaatatgtcaacatacttcttgcgattatacaggtggaatcgggcggtactgcggaagatgttatgcagtcctcggaatccctcggtcttccacctaattcattgagtacagaagaatccattaagcaaggtgtgaagtatttcagtgaattattagccagtagcgaaaggctcagtgtagatttagaatcggttatccagtcctacaattatggtggtggtttcttagggtatgtggctaatcgtggaaataaatatacctttgaactggctcaaagtttctcaaaagagtattcaggtggcgaaaaagtgtcttaccccaatcccatagccatacctatcaatgggggctggcgatacaactatggcaatatgttttatgtgcaactggtaacgcagtatcttgtcacaacagagtttgatgatgatacggtacaagccatcatggacgaagcactgaaatatgagggctggcgatacgtttacggtggagcttccccgactacttcttttgattgtagcggactgacacaatggacgtatggaaaagctggaattaacttaccacgaaccgcacaacagcaatatgatgtgacccagcatatcccactatcggaagcacaagctggcgatttggttttctttcattctacctataacgctggctcttatattactcatgttgggatataccttggcaataaccgtatgtttcatgcaggcgacccaatcggttatgccgacttaacaagcccctactggcaacagcatttagtgggagcaggacgaatcaaacaatgagaaaggaagatttaatgatgaaatttagaaaaaatcagaataaagaaaaacagataccaaaggaaaagaaacctcgtgtctactataaggtcaatcctcataaaaaggttgtgattgccttgtgggtacttttagggcttagtttcagctttgcgatattcaagcactttacagctatagatactcatactattcacgaaacaactatcatagaaaaggaatacgttgatactcatcatgtagaaaattttgtagagaactttgcgaaagtctactattcatgggagcaatccgataagtccattgataatcgaatggaaagtctaaaaggctatctgacagatgaacttcaagctctcaatgttgatacagtacgcaaagatattcctgtatcgtcttctgtaagaggatttcagatatggacggtagagccaactggcgacaatgagtttaatgtaacctacagtgtagaccagctcattacagagggagaaaatacaaagaccgtccactctgcttatatagtgagtgtctatgtagatggttctggaaatatggtactggttaagaatccgaccattaccaacatacctaagaaatcaagttataaaccaaaagccattgaaagtgaggggacggttgattccattacaaccaatgaaatcaatgagtttttaacgacgttcttcaagctctatcctacagcgacagccagtgaactttcctactatgtgaatgacgggatattaaaaccaatcggaaaagagtacatctttcaagaactggtaaatcctattcacaatcgtaaggataatcaagtcacggtatcgctgacagtggagtatatcgaccagcagaccaaagcaacgcaggtatctcaatttgatttggtacttgaaaagaacgggagtaattggaagattatagaataacaaatattggtacattattacagctattttgtaatcacgtactctctttgataaaaaattggagattcctttacaaatatgctcttacgtgctattatttaagtgactatttaaaaggagttaataaatatgcggcaaggtattcttaaataaactgtcaatttgatagcgggaacaaataattagatgtccttttttaggagggcttagttttttgtacccagtttaagaatacctttatcatgtgattctaaagtatccagagaatatctgtatgctttgtatacctatggttatgcataaaaatcccagtgataaaagtatttatcactgggatttttatgcccttttgggtttttgaatggaggaaaatcacatgaaaattattaatattggagttttagctcatgttgatgcaggaaaaactaccttaacagaaagcttattatataacagtggagcgattacagaattaggaagcgtggacaaaggtacaacgaggacggataatacgcttttagaacgtcagagaggaattacaattcagacaggaataacctcttttcagtgggaaaatacgaaggtgaacatcatagacacgccaggacatatggatttcttagcagaagtatatcgttcattatcagttttagatggggcaattctactgatttctgcaaaagatggcgtacaagcacaaactcgtatattatttcatgcacttaggaaaatggggattcccacaatcttttttatcaataagattgaccaaaatggaattgatttatcaacggtttatcaggatattaaagagaaactttctgccgaaattgtaatcaaacagaaggtagaactgtatcctaatatgtgtgtgacgaactttaccgaatctgaacaatgggatacggtaatagagggaaacgatgaccttttagagaaatatatgtccggtaaatcattagaagcattggaactcgaacaagaggaaagcataagatttcagaattgttctctgttccctctttatcatggaagtgcaaaaagtaatatagggattgataaccttatagaagttattactaataaattttattcatcaacacatcgaggtccgtctgaactttgcggaaatgttttcaaaattgaatatacaaaaaaaagacaacgtcttgcatatatacgcctttatagtggagtactacatttacgagattcggttagagtatcagaaaaagaaaaaataaaagttacagaaatgtatacttcaataaatggtgaattatgtaagattgatagagcttattctggagaaattgttattttgcaaaatgagtttttgaagttaaatagtgttcttggagatacaaaactattgccacagagaaaaaagattgaaaatccgcaccctctactacaaacaactgttgaaccgagtaaacctgaacagagagaaatgttgcttgatgcccttttggaaatctcagatagtgatccgcttctacgatattacgtggattctacgacacatgaaattatactttctttcttagggaaagtacaaatggaagtgattagtgcactgttgcaagaaaagtatcatgtggagatagaactaaaagagcctacagtcatttatatggagagaccgttaaaaaatgcagaatataccattcacatcgaagtgccgccaaatcctttctgggcttccattggtttatctgtatcaccgcttccgttgggaagtggaatgcagtatgagagctcggtttctcttggatacttaaatcaatcatttcaaaatgcagttatggaagggatacgctatggttgcgaacaaggattatatggttggaatgtgacggattgtaaaatctgttttaagtacggtttatactatagccctgttagtactccagcagattttcggatgcttgctcctattgtattggaacaagtcttaaaaaaagctggaacagaattgttagagccatatcttagttttaaaatttatgcgccacaggaatatctttcacgagcatacaacgatgctcctaaatattgtgcgaacatcgtagacactcaattgaaaaataatgaggtcattcttagtggagaaatccctgctcggtgtattcaagaatatcgtagtgatttaactttctttacaaatggacgtagtgtttgtttaacagagttaaaagggtaccatgttactaccggtgaacctgtttgccagccccgtcgtccaaatagtcggatagataaagtacgatatatgttcaataaaataacttagtgtattttatgttgttatataaatatggtttcttgttaaataagatgaaatattttttaataaagatttgaattaaagtgtaaaggaggagatagttattataaactacaagtggatattgtgtcctgtatgtggaaataaaacacgattaaagataagggaagatactgaattaaaaaaattccccctctattgtccgaaatgcagacaagaaaatttaattgaaataaagcagttcaaagtaactgtgattacagagccagacgcaaagacgcagagccgataaaatgagattaatacaatctcattttatcggctctttccgttatgtatggattcttttaattagtcttcgatgtttcttgcttcgttgataccgctggctaaagattccattaaggatagttctttgtctgtaaagctatccatgtatttctctatctgtaatcgtcgggtgctttttaccaagttattagcaggtaagaaaaattcatcaacggaaacatgaagtaacgatacaaggtcataaagaacttgtatgctggggtgttgccctttattttcaatattagttaagtaccgtgggtcaatttcaatcaatgctcccacttgttcacgagttaaacctcgtttcaatcgagcttctttaatggctaaaccaaaggctctaaaatcatatttatcttcttttttacgcatagtagaccacctctatacattttattgttcctactgaattaaaaacaggtatagaaaaacgtgttatatggtttataggtttatatttaataaaaagcactactaaacgccaataaaaaaaaccgttatatggtagtgctatttacgctgttaaaatattgtatattacttccaaatggcggtttgttggaggtcaacgtcgccatgaagtacatcatatacaataaatttccttacattgggttcttgtcaaaaaaagtcgtctatctgcaatagataagtacgtccaccaatgtggttttataaatcatatagatagaataacagaagcatgtaaacagagaaataaatctgtttatatgcttttttggctattcagaacttttttacaaagtttatttatcagtaatgcaacaaatccccctttcacattgggactaagagtgaaaggagataaacgagcaaggctcacttcctttcctagacagaaagggggtgagaaacatgaaaccatcttcttttcagacaacaatagaaaatcagtttgactatatctgtaaacgtgctatggaagacgagcgaaagaattatatgctttatctttcaaggattgcaaagcgtgaggtgtccttttcggatgttggcgattatcttgttagccagtttgcgacaacagataactattcaactgactttcagatttttacactcaatgggttatcagtaggcgttgaaaatgatttgttgagtgaagcattacgtgagttgccagacaagaaacgtgaaattctactgctgttttactttatggacatgagcgattcagaaattgcagacctgttgaaattgaaccgttctactgtctatcggcatagaaccagtggactagccttaattaaaaagtttatggaggaatttgaagaatgaaaacacaatatcctatgattccctttcctctcattgtaaaggcaacagatggcgataccgaagcgattaaccagattctacatcattacagagggtacataacgaagcgttccctacgacttatgaaagatgaatatggcaatcaaagtatggtcgttgatgaagtcttacgtggaagaatggaaaccagactgattacaaagattttgtcatttgaaattaagtaatatcctctctcctttcgtggaagcgtgctaaaccattccacgcttcccgaacagggaggtttgttattccaccaaagcatattgagctttcaatgtgttttgataggctaacgagccattgttctttgaaaactgaataaaagtaatcgaatacgtttcgataagaaaagagccaacggaactaaccgccatgacctatcttataaagatagcgagcgattcatgttagtgatccgagaagcaatctttagcaggattgcctgcaacgacattcttatcgtgataatgatactcccatacagtcaatagtccgagcgtgataaaaccgtcgcaggcaatgagtatggctacatgagaaccatgcaggggtggaactcccgtgagctttgctaaagctgttcgattgctggtaaaacaacttttatgaaatccaaataagtgatttggaaaggaggattttatgaagcagactgacattcctatttgggaacgttataccctaaccattgaagaagcgtcaaaatattttcgtattggcgaaaacaagctacgacgcttggcagaggaaaataaaaatgcaaattggctgattatgaatggcaatcgtattcagattaaacgaaaacaatttgaaaaaattatagatacattggacgcaatctagcgtcgccaaagggtcttgtatatgataaaatagtattaagtcgtatcaaggctctttccataaaggaaaggagcaaatgccatgtcagaaaaaagacgtgacaataaaggtcgaatcttaaagactggagagagccaacgaaaagacggaagatacttatacaaatatatagattcatttggagaaccgcaatttgtttactcgtggaaacttgtggctacagaccgagtaccagcaggaaagcgtgattgtatctcacttagagagaaaatcgcagagttacagaaagacattcatgatggtattgatgttgtaggaaagaaaatgacactctgccagctttacgcaaaacagaacgctcaaagaccaaaggttagaaaaaacactgaaactggacgcaaatatcttatggatattttgaagaaagacaagttaggtgtaagaagtattgacagtattaagccatcagacgctaaagaatgggctattagaatgagtgaaaatggttatgcttatcaaaccatcaataactacaaacgttctttaaaggcttcattctatattgctatacaagatgattgtgttcggaagaatccatttgactttcaactgaaagcagttcttgatgatgatactgtccctaagaccgtactaacagaagaacaggaagaaaaactgttagcctttgcaaaagctgataaaacctacagcaaaaattatgatgaaattctgatactcttaaaaacaggtcttcgtatttcagagtttggtggtttgacacttccagatttagattttgagaatcgtcttgtcaatatagaccatcagctattgagagatactgaaattgggtactacattgaaacaccaaagaccaaaagtggcgaacgtcaagttcctatggttgaagaagcctatcaagcatttaagcgagtgttagcgaatcgaaagaatgataagcgtgttgagattgatggatatagtgatttcctctttcttaatagaaagaactatccaaaagtggcaagtgattacaacggcatgatgaaaggtcttgttaagaaatacaataagtataacgaggataaattgccacacatcactccacatagtttgcgacatacattctgtaccaactatgcaaatgcaggaatgaatccaaaggcattacagtacattatgggacatgctaatatagccatgacgctgaactattacgcacatgcaacattcgattctgcaatggcagaaatgaaacgcttgaataaagagaagcaacaggagcgtcttgttgcttagtagtacaaatgaatttactacttatttaccacttctgacagctaagacatgaggaaatatgcaaagaaacgtgaagtatcttcctacagtaaaaatactcgaaagcacatagaataaggctttacgagcatttaagaaaatataaaaagataattagaaatttatactttgttttaattaaaaaattaatgcaaactcatctccgccatagcgatacattgcctgcttaggcaataaataacgtaaataatgacaaacttctaaaagaatttgatcacctatttcttggccgaatttatcattaataaacttaaaattttttaaagaaataactacagcaataaaaggtttgttattatcgattaagatatcgatcatcttgttgaattcttgacgattcaacaaattcgttaatgtatctgtgaacatttgcttgttttgtaaatacaaataaataattaaaagagcactagtggctgcggtacctgttaaaatatattcagggtgaatatattgaaataggattacaaaggcagaaataaaagggaatacccctaaaatataacttacatttcgttcgagcgatttccttttatgaattactagaatcaatgaaaaaaagacataaatataaaagactaaatatgtaataaatatccaaggtccttgttgataaccggatacttgatcaaacgaaaagagcaacgacgtatagaaattactaaaaactaaaagaacgtataatattgatggtaaactgcaaagtgcagcatatttcttgacctctttttcatcataaatattagctagtgcatagatgaaatagatagcgcccattaacggtgtgcttaaatagtaaattagtagaaaaaagctattaaagaataatggtacttgcttataatattgtaaaagtgttgttgaaataatattagagctgactgaaagaaaagtaatgaataaacaatactgaaaaactttattttttacggttggtagaagatttcctttacgggcatagactaaaataatgcataatgttattgctgaaacaagttctgccgtgatatcccaaatcaatattttcaccacattcctataatgtattctttatagattatatcacaaatcaatcacataaagttaatagatataaagattttttgacattcaaaaatttatttaactctaatttgtgaataaaggcattgacagataaacagagagataatttaattggtagactataagtaacttaagaaaggggttattaaatatgtatgcatggcaagagattcaggtgacacttgattatattgaagaaaattatgataaagagattgatattgataaattagcagcaattgctcatttatcaaaatactactatcagcgattattttttcgtttaactaaaaaaactgtgaatgattatgtgaagctgcggcgcttagaaaaagctgccaatcaattaaaaaatacggaaaaaagaatcttagatattgcaatagcctgtggtttttctggacatagtgcttttactcgggcttttaaagaagtctataaaattacaccagatgattatcgtaatcaaaaaattcatttagatcatttcattaaaccagatttacagcttaattatgttgtaattgatactggcgtgccattgatcgtagaagggatggttttagagataaatgaaaaacaagtttgtaatgatcgaattttttatggtaaaagcaaaatggctaaagtagatgaattaggtgaaccgaagataaataacatagtttctttgtaccaggaattagatgttcaagatgcggtagtagtagatattttaacattgagtgatgatcctgccttatttaattattttgtagggattgaaattgatagaccgtcaattgattgtgaacaacgaattattcctagtggtaagtatgtagtatgtagttatgaagcagaaaattttgaatcattagtgaatgaagctttatataaggctagccgatatttgtatgaagtttggtttgttgaacatcgtcttgaaccagatgatcttctggttcaaaaatattataatccttatcaggaaaattgttatattgaactttgggctaaagtacgatcataaaaatacatcattttaaatgacgtgttttcactttattcgcatctttatagataaatacttaaaaaacgtgtaattagttttacgcgtttttagcattattagaatcgttactgcatataatttgttaggtgattttgtgaagagaacgtatcttataatagcgattacagcagcattgtatcttgcgggacattatttttatcctaaaaatgatgtggccgtaagcaaagatttaccattaaaaaatgtatcagtagtaattgatcccggacatgggggccttgataatggtgcaagtgttggaaaaatttatgaatcggaattaaatttaaaaatttcatatgccttgaaagaagaacttgaaagtcgaggggcaacagtaaatatgactcgtgaagacgagcaggatatgaccaaacgaaatcatcactattcaaaacaggatgatatgtatttaagggttaaaaagatagattcatataaaagtgattatttaatcagtattcatttaaactcagctccagcctcaggtgcttggggttcccaagtattttattataaaaacagtgataaaggaaagcgccttgccagtgaaatacaaactacgatgaaagaagttacaggaagtgcaaaacgcatttcaggtgcagatttccgagttttacgggcaacccagacagtcggagtattgattgaatgtggttttatctctaatgctaatgaaagaggacaactgcaaagtagtaagtatcatcaaaaattagcagtcaaaatatgtgatgggattgaaaaatatcgtgagaaatatccagaagatacaattgatccaaaggattatgaaaagatattatcgtagaaaaactccttttttaagtacactctataatttagttggctgagttatggaagtgtgcttcattttataggagttttttaaatataaataataaaatatattgtcaaaaacaataaaaaaatataataaatagtaatgaaagcatttacatcttttcttgtaaatgatatatttgtgtgtataaaaaataatttttgcttataaaaagtttttaatgtgataaattaatggataaaatacaacaaattataccaaaatataaaagaaaggggtttagcaagatgaaaaaaattgttttattgtgggatacagaaataccaagtgatttttttgttgaaaagctgattgaagaatctgaaaaaggctctgtaaaatgtgaaattcaagcttattcaattgctgaagcattagaaaaccgaattgatgctgatgttgtcttgttaagtcctttgatttgttttgaacaaattaaaattgagcgtttagtacgttgtccggttgatataatcggaattggtgcttatgctttatttgatgttaaggcaattttattaaaagcatttgatgcgatgagaaaaaagagaatctaatatgtaggcaacctatttaggctgcttttttgttacttgaaattgctgattataaaattgatataggattataaggatatatatgagggcgataatattaacagcataataatttaaattaattagaaggctattaataaatggatcgatgtaattaactaaaataattcctaaaaatccccacatcaagctatagaacatacaaatacggctagtataattgctaggtattttaccataattccatacttctatttgtgaatcatatgataagaaaaagtgagtcaaatattctagggcagtacagccgaatagtgaataaaaaaagatttcaaaattattagtatgataagggacaatgcttaaaatcaataatgcaccaaagccatagatagggataaacggtccttttagtaatcccgatagatagaattctttctttaagattgaaacatatactgactcaagaataaatcctaaaaatgtataaattgcaaattttatcattattacctcctttaataatatatgtaattaaaagaggaatatacaagaatcttatcttaaagatgaggtatcagatacgatgaatattaatattaaaaatgaacttattatttttgatttaaaataataagttcattcaatttagtagtttttattatattgcaatgcaagtatgttgttataaagatttattttaataattttttaatattattttcaatttctcttggctttactaacggttcaaagcgggcaacgacatcaccctcttgattaactaaaaattttgtgaagttccagtcgattcgttttgataaagtactatcttgtttttcttttaaatatgtataaagtggtgattcatttgggccgttgacttcgattttagcaaattgcggaaaactaacaccataagtatccgcacaaaaagacatgatttcttccattgttccaggtgcttgttcaccgaattgattacatgggaaatctagaatacaaaaaccataattatgatatttttcataaagttcttctaaatcatcatattgctcggtgaattcacaatcggttgctgtattgacgattagtaaaacttgatctttataattatttagtgagattgtttgattgttattatctaatacttctatttcatataagttcataattgcctcccttaaatataaactataatcaaagtataacaatatttagatatgcaaacaaataatatgcaatgacgattttttgataaaattaagaaataaaaaaaattgtcaaaattataaataaatgcttgacggtaaagaatctacatgctattatattagggcagttgattgatgggcctgtagctcagttggttagagcgcacccctgataagggtgaggtcgatggttcaaatccattcaggcccaccattagttaattgcaaatagatatatatgggcctgtagctcagttggttagagcgcacccctgataagggtgaggtcgatggttcaaatccattcaggcccaccatatatattttaatattttggggccttagctcagctgggagagcacctgccttgcacgcagggggtcagcggttcgatcccgctaggctccaccaattgtatattaagtctgctttggcagactttttaatttatttaaaggaggcaaaatatgactggaaagttgataattcttgtggtttcattctttatttattgtttaatggggtggatttgggaatcaatcattttgcctttatcacggcatcaaaaaccatataatcgaggttttttaaatggtccctggattcctatttatggttttggtgcaatgctggtaattgttttatttgatattcagcaggttaattatcctatttatactttatttattagtggcggggtagtagcttgtttattagaatatattacttcgtatgtaatggagaaactgttccatcgacgctggtgggattatagccaaaagtcttttaatttgaatggtcgtgtttgtttagagggttttatttgttttggtttatttagtgttgtggcaatcgattatgttcagcctttttttactagtaagctattattagttgatgaaaatattttatttgtcttaagtggggttttatcagttctctttattgttgatacaattgtatcaacacatgtagcattggatattgaaaagaaattagaattagtaaaacaagtactggaagaaagtgaaaatagattgattgcaagtattgaggaaaaacaaaatgaagcacgtgcatatattgaaaaacagcgtctagaatggcaaaagcagcaaatcgtcttaaaatcattaattagacaaaagaagttgtttaaatatgggcaccggcgtttgatacgtgcgttccctaatttattaaagagaaaaaaggatgagtgatgatgctgaagaaatattttggaactaaacaattctatagaactgttattagtattgcttttccaattatggctcaacagtttatcacaacgtttgtaaatttaattgataatgtaatgattggcagtattggcaatattgcattaacttcagtaacggtggcaaatcgtttttttctaattatgaactcaattttatttgggttatgtggagcggcgggaatctatattgctcaatttttcggggctaagcagaagaaaaattgccaagaggtatttaatattaatatggcttttgcggttggggcaggacttttatttacattaataatttttatttttcctcaatacgcaattgaattgttttctaaaacaccgattatagttgatgaggcgattaaatatttacatcttgctaaatatacatatatcccttttgctgtttcgttcacttgtatgatggctttacgagcagttggtattaacaagattcagctaaaagtggggatagtagcagtaataactaataccgcattaaactattgtttgatttttggaaattttggattctttaaaatgggaattcaaggggcggctattgcaacgattattgctcgacttgttgaaatggcaatatatttgattattttatatcgaaataaacatttctttagttttgatttaaaagggataattagaattaatgtcaacttattaaccagtattgttcgtaaagcaattcctttgacaatcaatgaaattttgttttcattgggacaagctttaatttttatgtcatatatgcgatgtgacgaatatttagtggcttccatatctgttgttgacacagtagctaatataatgtttattgtttttggtggtctatcttcagctgtgtcgatcatgataggaaataaattaggtgctaataaacttgatgaggctagagataatgcgcgtaaattattatgttttgcattgatggtatcgttaatgattgggatgatatgttttttattggcaccactgattcctaatctgtataatgttgatataccaattaaagaagcaatcgtaagattggttcgaattaaatcgataatgattaatatctatgcttttaatgtctgcatcttctttattttaagggcgggtggagatgttgttagtacgatgattatggattcaggttttttgtgggctgctggagtactggtttcaactctattatcgtcatttacgactatttctttaatttcgttatatatcgttgttgaaagtttggatttgataaaattaataattgcaacctacttctttaaaaaagaacgctgggttaaaaatattgcagttgtaggaggttagaatgaaaaaagataactatattattaaatcattaaatggaatggcatatggctttttctgcagtttgatcattggaacgatttttaaacaaataggaaattttgctaatattagccaactagctgcttggggtgaggtggcaacttatttaatgggaccagcgattggagcaggtattgcttatgcaatcgatgctaaaggattaaatctaattgcggcagtaattgctggaacgattggagcaggaacatttaatggtaatacggcgacaactggaaatccaatcgcagcgtttgtagccgtaattattgcagtagaagtaacaagattagtacaaggaaaaacaccggttgatattttgttagtgccttttacttctattatagttgcgggaatagtgacaatatttattggtccatatatcactaaattaattgtttggattggtgatttaattaatcaaggggtaaacatgcagccatttttcatgtcaattgtagttgcagctttgatgggaatggctttaacagcaccgatatctagtgcggcgatcggagtgatgttgggacttaatggtttagctgctggggctgctttagctgggtgttgtgctcaaatgattggttttgcggtaatgtcgatggatgataatgatattggtgatgttgtagcaattggcattggaacaagtatgctgcagtttaaaaatattgtaaagcatccgataatttggcttccgccgattttaacaagtgctattattgctccaatttctacttgtttgttggaaatatcttgttcagcaattggttcaggaatgggaactgcaggactggtagggattttagaagctgttaatgtgatgggaaataattattggattccaatcattgttattgatttactagcaccaatgttgatcagctttggaatttataaagcttttagaaaattaaactatattaaagcagggtatcttaaattagaccgtttttagttaataaataaattttaaactcttaaatttggtggatatatgtgttagaattatacataatcagggaagaaagcttcatccaacaaaaaaagggggcgataaaatgctgtttacatacaagcaaattgctaatttgaatgaaacagaaacatttatttatcgttatgtaatgaagcacattaaagttgttacaaatatgagtgttcgtgatctggctgaatgtactcatgtatcaacggcgacagtagtacggttttgtcaaaaattggattgcaatggttttgtagaattcaagacaaagttaaagttatttaatgatggacttactctaccagaaactgatgatgaaattgatgttcttttagaattttttaactatgcacgaagtgtagattttaaggagaaaattaataaatttgttaagtatatcaaggaagctaagtcgatttgttttttaggaattggaacaagtggtactttaggaaaatatggggctcgttatttttcaaatgtagggtattattcacaaagtatcgatgatccttattatcccccaccagttgatggtaatgaaagttcattattaattgctttgaccgaaagtggtgaaactcgagaagtaattgatcagcttaaaatgtatcagagtcagaatacaaaaattgtggtaatcactaataagccagggtcaacaattgatcaaatggcagatttgggaatctactattatgttaaagatattattttaccacaaacatataatatttcatctcaagttcctgttctttatattcttgagcgtgttactcatgagttacaaaatgctaaggaaaaatcgctgccgttgaagtttaccagccgtaatttataatgtggaaaactactaaaaaataagtagttttttttataaaaaaataagcaaacttgttacatttaatgtaacccgttacataacctcttgcgttcattccttcttattattaattatgttattttataggtgtaatgttaagcacattgcattgaatatcaaataatcattaagcgcttatagtatttgatattctaattgttatggattgtattgaagtaggccgctttgatacaattcaaatattgcttatatacgaaatatattaagaaggggaaatggaaaatgataaaaagattaaacaagaatttttttgcagctattctgacctttgcgatggcaattggtatgatagcacctgtaaatgttgcagcgaatgacgaatacttgaattttgatcaggattcaatttatgcaattgtttcaactacaactggaaaagcattaaatattaaaacagctagctggacatcacctgcagaagcagatggtgaatataatgctaagacaaataaaataagtaactcatcacaatttatgtttattaatgaaaatgatggttcagtaacaattaagtatactggtataaatgatgggcaagattattacttaagaacagagtctgggcaaacatatgtatgggctgatactagaaatgaagataccacagctaagtataaaataactaaaacggccgataaccaaggtattattgaaagtatgaaaagaactaatgaatatctttcaattgatagtaaaggaaaattagtctatacaagtgatagagatttggctgaaaaatttaattttgtcaaaaatcctggaattatcagtaatatcgcttggattgaaaatgtggctacaggaaagttagtaacatttgctgatcagccagatgaaaacttttctgcaattaaggtaactggagatgctggtaatataggtgatactgaaaagtttaaagttacttttcacactaatgacaatgggattaaaaatgtaatttcatttgaatcggttagtaaaccaggttatcaaattgcatcagctaagtgggtagatggcgctgtacctaccattgggtcatataaaaaagtgggtggtggctgggaagctatcgcagttgaaccgattggaaatggattgtttgtattaaaggatgcagctacaggaaaattggttactgcaaataatgatgaagttctagaaggtggttatgaaggggaattaactgatcgagaaaaatttattatccataatgctattgatattgctgatgtcacagatttaaaagctgatgatagctcaagaactgaaaccacaattgatcttacttggacaaatccgaatagtttatatactgatgtaaccttatttaaaaaagcttcaaatgaagtagtgtttgataaagttgctgatgtaactggaaaaaacagctatcaagtaactgatttgaaagcggggatgcaatatagttttaaattagaatatgtaaatggaaatggaaatttatcagatattaataatccgaaaaatgaaagtgctgaattgaaagttagtacaagagcaggagcaaaaccagcgacaccagcagatgttaaattagttgaaaaagatggtgagttcacaattagctggggagctgctgaaaatgcaacacactatcaattgttaagagcagatagtatgcttggggaatataatgtcgtagagactgtaactagagatagtacttctgttactgttgcacctataggtgataaatacgagaattattatcgcatcattgctctaaataatggacaaaataatgatgatgatttatcaaatgctgaaatttcggaacgttctgagtatgcatctctagaaaagaatatatttggggaacatacgttgttcttctcacccaaagatgatgtagcacaacttgataaaatattattagatttattcaatcaacaaaatgatagaggagcagatgctcaatttaaagggcaacaataccaagtttatttcaaaccaggtgattatactgaaactacatgtatgtatttagggttctatacatcatttaatggtttgggaaaaacaccaatggatgttaagttaaataatatcgcaattccatcttatctagatggtaataatgctacttgtaatttctggcgttctgcagagaatctagctgttataaatactgggaatgaacaaggaaaggctggcttcgattgtaatcttgcccgaccagaatattttaactgggcagtagctcaagctgcaccgcttcgtagagtatattcaagtcgtccggttggatatgactggaattatggatgggctagtggtggatacgtagcagattgtatgtttgaaggtgtatttgaagataaaggaaatcaattatcagctggaacatatagtggacaacaattctatactagaaatagtaaattgacaggaggcggatatggaactactttaaataatttcttccaaggtgttgatgctcctaatttaccaactgaaaaagatggtgatgctttagctaatggcaatggatattcaaattggggtaaagaagctgcgaatggggaacagcaagtattcacaaatgttgaaaaaacaaagaaacttagtgaaaagccattcctatatttagataatggtgaatataagatctttgttcctgacttacaaaaagatacatctggtacaagctggactaaagatggtgatatgggtaaagggaaaagtttatctttaagtgaattctatatagctaagccaagtgattcggctaaaacaattaatgaacaattagataaaggtaaaaatatttatttcacacctggaacatatcatgctgaagaatcaattaaggttaataaagcaaatacgattttaataggtacaggtatgacttcaattattcctgataatgatgaagcagcaatggaaattgctgatgtagatggtattaaagtagctggcttgatttttgatgctggtgaaaaggattcaaattatttgttaaaagttggacctgctaatagtgataaagatcattctgctaatccaactatactacaagatttattctttagagttggtggaactacagctaatccaacacgtgcaaaaaatgcattagaaattaatagcaacgatgtaattactgatcatttctggatttggcgtgctgaccatggtaatggtgtaagctggagtggtaatgctgctgatcatggtttgattgttaatggtgataatgtaacatgttatgcattattcaatgagcatttcaataaatatgatacattatggaacggtgaaaatggtgcaacatatttttatcaaaatgaaaaatgttatgatcctattagtcaagaggcttggatgtcacataatggaacagtaaatggatatgctgcttataaagtagctaatgatgttaaggagcattatgcagttggattgggaatttataatgtatttatttatactggtgaagattatgattcttcaaaagtgcaaattcaaatggatagtgcaattgaagtaccaaatagcaaaggtgtaattattgaaaatgcatgtttacaaacatttgctgatgaaaataaagtattacaaaaatttaatcatattattaatgatgttggtcctggtgtaagcagtggaactgataaagatgattttgctattaaaggtgaaggctggtcaagaaaattcttattaaattattgtgatggaactgctgtttatggtaagatgccagctgctgatcaaaaaggaaaatttattggaacagtaactgaagaaaacataaaagcattaggtgatgataatattgatacaaaaacattgagtgatctatataatgtgaataaggataaaaatgaaaataattatacagttgatagctggaaggtatttgtgaaagcgttagatgatgctggtaaacaattgaatgctgatttaaaatatgcatatcaaaaagattttgatagtgcaaaagatgtattgaatgatgctattgataatttagtattagttggtgctgattatagtaaagttgatagtatcaaggctgaagctgaaaaagttttagcaagtgataactatactaaagattattacacagaggcaacaagagcgacatttgataaagctaataaagcattaaatgatcttgctgatgatttaacgattttagaacagaataaagttgatgatgcaattgaattattgactgaagcaattaatggtttaacattaaaaggtgccgattatagtaaattagatgtagttaaaaaggaagctgaaaaagttttgataagtgataattacactaaaggtcactatacagaagaatcgaaagcattgtttgatgaagcttatgaagtgttaagtagtcttgctgataatttaacaattattgatcaaggtatggttgatgaagtagtaaaggcattagatactgcgattaaaggtttaacattaaaaactgaagaaccggggcaaattgtaaaaccaaatgagcctggtcaatcaacaaaaccaagtgatagcagtagtgctaaaacaggcgatgatcaaatgatttatggttatggaattgttactctccttgcactgggtggtttaatgatgttaaaaagacatcatactagctagtggagaagaattatgaaaaaaagtaaaattataaaggtagcaatactcgcactatttagtgcggtattgctcacattaaataatgtaggagctatttcaagtaatccatataatgattggaaaacttcagcgattaattatcctaataatgggcagttagttccagcgggaccaattacaataacctgggatagattaagtattgatagtcatgaagtaattggttatgaggtatatcttgataatgttcttcaaaattcaacaattattgatgaaggtgatatttttagttgtgaagtttatacaactaaagtggcacagcatcaagttaaaatattagctcaattgagcaataatactaagatttcaactagtgctagaaatttttacatatctaaaaaaggtatgggtttttatagtggtaacggctacagtgcaattcaagatgcacaaaatatgggattgtcttggtattacaattggggaacggcaccaacgtatgctggtacttgtccaaatcaaaagatagattttgttcctatgatctggggtgcctataatggttcaaacgagcaattaacaacaattaaaaatgcgggatataaaacagtattgggttataatgaaccggattttgtagatcaatcgaatgttccagtagctacagcgattgcaaatcaacattattttacaaatagtggtatgagaattggggcaccggcaacggctattcaggctcctaattctgaatggtttaatgagtattggcagggaattaatacagatgatattgattttatacctgttcataattatcctggtaatattggagttactgataaagaaattaaagacaatgctaaaagtttattaaattttattaatgaaacacataataaatttaataaaccgatttgggttacagaatttgcggtagctaattggaatccatattgggatggttataatggtgctaacgaagcgaataaagctgaagtgagaaagtttttgaattacgttattaatgggttcgataataatgtaggactaaatgatttagaatttgttgagcgatatgcctggttttcatttgatgcactagatcgttatggtggtgattcaggattatttaatactaaagcagatcatgataaaaatagcatgttaaaaattgggacattaacaactttaggaaatgattatcgtaatcttggtaatccggaaggttatatattgccaaacttaatgggggaaatagaaccgtctattgaagatgaatatgttgatgattatgttaatgtcatgattaatggtcgaagtgaaaacgtggtattgggtagtaaatttgataaaatcgatacgcctgttaaagatggatatgtatttagcgggtggtatagtgatgaggcgtgtactaaagaatatgattttgatagtattgtcactgataatgtcacaatttatccaaaatggcttaagatgcacacagtaacaattgatggtatagataataaagtaattgatggcaatacagcggttaagcctcttccttctgttaaagatggttatgtatttaagggatggtatagtgattcagaatataataataaatttgatttcaatgagccaattagaggcgatattgcaatttattcaaaatgggtaaaattggtaacggtttcggttgataataataaagtgctgattgaaagtggtacagttttatcaaggccagatatgccaataaaaaatgggtatacttttgcagggtggtacagtgatgaagcgtgtactaaagagtttgattttgctaagccattgttagaagatgtgacgatttatactaagtggaaaaaagtaattgatccaatggaaaaagaagaccaaaccacttcaattaatagtgttaaaaccggcgataattttgcaattcaaggttatgtcctaggtttgattggagtaatggtggcaattgtaatgatgcaaaaaaaatataataaataaagatattatgtatataattgactacttgataaaaaacctctcctcattgaaatttatcaaattaaatacaagtagttcaagatgttaaaagggaagtgaaggccacttccttttttgtgaaaataaaaacagtatttactattgtttgaatattgtttataaatcaacgattatgcaaagagttctttcaaaattattatcaattattttagtatttataatactgatatcttttttgtagagctctaatgcctttttttcacggcgatgcaggcatcgataacaggattcgattatttctccagtatttgtagcgattaaatagttattgcagtcatttgtcaacaattgacctttcaatagttcatcaaatatcattacctttccccctcttgttttatgatattaaaatatcataattaaaaggtaaataatataggtggaatgattgttgaaaatagttacattagatgtaacaaaaagaaggcattttagccttcttgattgattgaaaataaagatatgatatcagctgttgacatcttagtaatacttccgtcattattttcaataaaaatatttgataaatcttgtttctgagcttgaagttcttggattttttcttcaatactgtttttcatgattaatttataaacttgtacgttattggtttgaccaatgcgataagcacggtcagttgcctggttttgagccgacatattccaccatgggtcaaagtgaataacaatcgatgctgcggttagatttagaccggttcctccggcctttaaagaaattaagaaaacatctgtattgtcattttgaaaagcgttaactaattgatgacgtttgattttattggttgccccggttaaaacgtaatatgatatatcctctttacgaagttctttttctaataaatctaaagagctggtaaatgatgaaaataatagaactttttgattgttttctttagctttctttattatatctagacaagctttcatttttgaactaggaccaataatttcattatatagaattctagcatcgcagcagatttgacgtaatcgtgtcatcattgctagaatttgaattttatcaattcgttcaacgtctaatgctgtcttaagttcgctattaatttgacttaaattagctatatacagattttcttcttctttattaaaagcaatcttaatgttattctcaatcttatcaggtaattcttctaaaacttcttgttttgttcttcttaaaataaatggttcaaccattttctttaaacgaatttgagcatctttatcttcatcgcgaacgattggacgctcaaaatgttctctaaaataattgtaattatataaatagttaggcatcaaaaaatcaaaaattgaccataactctgcaagtgagttttcaattggggtacctgttagtgcaaaacgatgagtaccatgtaactcttttactgctctggcattttttgttgcttggtttttaatgtattgagcttcatcgagaacaatatattcaaatttaaatggtttatataattcaaaatcccttcttatataatcatatgatgtaatgataacatcgtagttgtttatttgttcaatcatctttttacgaacggataatgttccactaatacataggacattgagatcgtttgagaatttttttatttcatcctgccagtttaatattagggttgctggggttattacaatactagctttgtgattctttttagcgtcttctaatacagtaatcatttgtaaggtttttcctaatcccatatcatcagcaagaattcctccgaatccataatcgctcattgttttgatccatttataaccagtacattggtaatctcttaaaatatcactgaatggttcaggaacaggataattattgatattgcagttagttagatggttgatgagttcttggaattgttggttacggttaaaattaattgtttcgctatcttgtattaattcgtttaagaataatgctttggatttatcgactatgatagcgccatcttgaatatttttgttttcaagatttaaatcttgaattaaattataggcttcatttaaagtttgatcttctaaattcacaaattcaccattttttaaacgatgataggctttgtgtttttggtatgattctaaaatatctcggatttcatcttttgaaacattaatactgtctaaatcaatctctaatagatcattttttaaacggataccaatgtttaaagaaatgtttttaggtttattaatatttttaatgtcttcactgacaaatacatcacaatatctatttaatttaggcaaaatattttttataaaatagtatatatcttcatcgttattggtgattaaatacatattcgttagttcatcatattgcgcgtaatcttcaatcattgctagtgctgtatcaacgttgagtggcagcttggtttcataactgtcaatatatttaccgtcaaataatatattaccttcatcatcacgatattcaagattgattgttaaatcaccaaagttattcaaatcaacgtaagtaagtaaagtgatcacactaggcatataatcgtcgatattagctcctgtaatggcaatataaggtaagatttgatcaatgatatatttgccaaaataaccaaaatcttcttttgcgacaatgagattttctttatctaatttagaaatcagttttttagtaattttagacattttaagactgtaacgatttaaaatgtttttgtctaaataatataaatattggttaccaataattaattggccgcctaatggcaaaagtgatatttcaaagtaatcttctttatcttcgatgttgattgttaaattatttagatcaatagtggtaaaaaacatattgatgttaagatttgtgagatatgtttcaaaaaattcatcaatattatatttgttaatatcaatagaacgatatctttcaatatcatcaataaattcgctattatcccgaataaaatcaatttgttttaatgcttctgaactaaatgatttacgattgtaatcggttgttaactgactaccgtaagtatatacattgtgataacgatagttatatatgaattctttaagattttttattaagtaagttttattttgaccaattcgataactaatcaagattcgattaaatgaataattaatattaggaattaaatcaatcaatgaatcatttgttagttgaggatcttgctgattagtgtagtcggtaattaatttttttgattcttcgagttttgtttgaattaatttttcttcacgaacgcgttcaaaggcttcaatttttgctttgtaatcaattttttgattaaactgaaaaggaatttcagacatttctaaactataaaattttaataatagtaccccaatatgaccacatgctaattcatcattatggcaataagggcaatcacattcaaaattatttatttttcctccagtatctacgacgatatgacaagtactactacgaccatatatttcaacagtaccatcaatgtggtactcatttccctgttttagaacggacatgtttgtgattacattatctttataataactgtgagcaattttccagtttttttcattaaatatcctatttatttcatcatctttaatatacatgttctttccctccgatagaatattatatcattattttaatgattaccaaatagataacattaaaaaaagataaataaaaaaagatattttatgacaaggaataaagtgttataatatgaatgcggttacttatgccggtatagctctaacggtagagcaatccactcgtaatggataggttgctggttcaaatccagttgccggcaccataattttatttcaataactttatctgattatttagaaaagttatgaatgtctatatatgaagcgataaactgtattcaatttgtcgctttttcgttttatcatattttaaaagaaagcagaaaattaataaatgtaatataaagttgtaatcgattttataaattcaaacatttaattatagattgattttttaattacatgaagaatatgtgaagaagtagattatgattattatatatatctaattttatttgatgatgaaattaagaatattatacaggattttaaaataaatgatggttctacgtatacagatgcaagttctttgacagagggaatgatggactaaagaattaacaactatagaaaaagcttttaggtttgattagataaaatgtgtatatgctcaaattttactagaatatcatctgattaaaaatgatatttcaagatatataaatattttatgtacattagctgattttaaatgtatacgataatttaaaaattaataatatcattgatagttatcatatattattgacaataggttaaataattgttattatattggtgtaaaattgaacagaaggattgtaactctttgaggcatgacctattatttaggataatgaatcaaagagtttttttgtataaaaggaggagttaatatgtttaaatttatgaataaacaagatggaggaattgtttcaccaatagatggaaaatgtataaatatagaggatgttccagataaagtattttcaacaagaatgatgggtgatggctttgcaattattccatcagataatattgttgtttcacctgttgatggaataattgttatgataccaaatagtaaacatgcatttggaattaaaactagaagtggggttgaaatattagtacacgttggtttggatactgtaaacttaaaaggtagaggatttgagatatttgtcaaagttggcgataaggtaaagaagaatatgcctatattaaaatttgatgataatattatggatgaaatgaatatagataaaacaactatggttatatttacagcaggttataatcaaagtataaaattagaatgttatgatagggaagttcatagaggagatactttgattaaatagaaggaggaatacttcgtgaaagtcatcaaaaaaataaataataatatagcaattgcagttgatggtgaaaacaatgaagttattgtatttgctaaaggaattggatatggaaatattccctatgaaataaaagatctctctgttattgagcgaaccttctatgatgttgacaatagatattatggtctacttaaggaaataccaaataacatttttaacttagttacaaaaatggtggatgttgcaaaaaagaatattgaagatgaattaagtcctaatttagtgtttattttagctgatcatattaattttgctattattagggagaaaaatggtatggatatttcgttaccatattcttatgaattagagtatgaatatccactattaacaaaaatatcaaagtggatggtaaaaaaaactaatgaggaattagatactcatttaccaaaaggtgaagttacaagtataactatgcattttattaatgcacttgaaggtacaaatacgaaaatgcatgcaggtaatattgaaaataagatatcaaaggttatctttaatgttactaacatagtagaaaaacattttaattttaatatagacaagaagagttttaattactttaggtttaaaaatcatctaaaatattttgttcaaagaaaagaagctagagaaatgttcacagataacaatcgtgaattatatgagagcatgatagaaaagtatccagatacctatgattgtatcagtaagatagataactatttttatcaggaatataaagaaaaatgtacgactgaggaactattatatttattagtccatgttaatagattgtatataaaagaggattgtcaccgaaagggcatcaccccagaaaagtaatactttgatggggttttattttactcattacattatttggcgcgcaagataatgttttgtatataaaaaggaggagaaaaaatggcaaagaaatatgaaaaacttgctaaaacgattttagattcaatcggtggaaaagaaaatattacatattttcaacattgtacaaccagattgcgttttaatttaaaggacaggagtattgtgaagatatctgatatagaaaatgtagatcaggtattaggaagtcaatggtccaatgatgaattgcagatcattattggacccgcagttgctgatgcttatgcggaaatttgtgagtttggcaatctccaaagagaagaagcaattgatgaagatcttgatggaaatgcagaaaagaaaaaagtcgctttaaaatctgtacttatgggaattatggatgggatatcaggatgtatcacgccgattattccaatgatgattggtggaggaatgatcaaagtattctatatgcttgcgaatatggtaggaatcttgcctgaaacaagctcaacatatcaaattttatattggttgggggatgcttttatctatttctttcccgtttttttaggcgcaacagctgctaaaaaatttggagcaaaccaaggtgtaggaatgttgttaggtgcattgcttatttatccaagttttattgcaatggcaactgaaggagctgctatgtcaatttttggattaccggtttatgttgcaaattattcaactaccgttattccaattattttaactgtttatattttaagtaaagttgagaaactaattaatcgatattgtccagatattttaaaatcatttgttgtccctacaggttctttattagtcatgttaccaattatgttagtagtaacggcaccgttgggatactatattggaacttatgtggcagaagcggttatttggatttatgaaacaattggtttcttaggggtttctattttgtgtgcattgttacctttaatggttatgactggtatgcatacaatgatgacaccatattggacttcggccttcgcctctttaggatatgatcctttctttttaccagctatgattctttctaatatgaatcaatttgcagcgactttagcagtatcattaaaagctaagacaaaaaaagtaaaatctactgccatgtcgtgtgcggttactgcaattgttggtggggtaacagaaccggctatgttcgggattacttttaagtataaaaaaccattgtatgcagcgatgattggaaatgcagctggaggattaattgctggactattaaaagttgcctgttatgcatttccaggatcaggaggtatgtttgcagtagttacttttgcgggtccaggaaataatttgatattctttttaattgctgcattggtaggaatgattattacatttatattaacttatattttaggaatagatgagaaagaggtgtagggagtggcttttccaaagaattttttatggggtggcgcaacggctgctaatcaatttgaaggtggttggaatgaagatggtaaattagattcaactgctgatcactttacattaggctcaagaacagagccaaggttattcactgaaaaaatagatgaggataaatatttttatccatcacataaggcgagtgatttctaccatcgttatcaagaagatattgctttactgggtgaaatgggatttaaggtttatagaatgtcaattaattggagccgtattttcccgcatggtgatgatgaagaaccaaatcaaaagggaattgaattttataggaatgtatttttagaattgaaaaagtataatattgaaccacttgtgacaatttcacattatgaaatgccttatcatttagcagaaaaatatgatggctggtatgcacgtgaaacaatagatttttatttaaaatattgtcaaacacttttcaatgaatacaaaggacttgttaaatattggctaacgtttaatgaaattaatagtttgattcttggaggtaatggatatttctctggtggaattctttcgtcatcaaaaaaggacatgggagctggcgttattgaagatttagatacattatcaacagtagaacaacataatgatattgtgaaacaatatcaagcattacatcatcaacttgttgctagtgcattggcgaccagaatggctcatgaaattagtggtgaataccaaataggatgcatgattgctggaattacacaatatccatattcttgtcgacctgaagatatgttattagtacagaaagaacgtagaaatattttctattattgtcctgatattcaaataaatggagcatatcctcgctatgcacatcgttatttgaaggaaaacgatattcatatcaactttggggagaatgacgaagatattttaaaaagcggaacagttgatttctttaccttttcatattattcaactggttgtgtaacaacagataaaaatttagaaaaaacaaatggtaatttaatatttggagttgctaatccatatctagaaaagagtcagtggggttggcagattgatcctttggggttacgttattttttaaatgaaatatacgaccgttatcatattcctattatggttgttgaaaatggattaggacaagatgataaattagaaatagataaaacggttcatgatgattatcgtattgaatatatgaaacaacatattcaggccatgtctgaagctgttgatgatggtgttgaacttgttggttatacaacatggggatgtattgatttagtggctgcatctactggcgagatgattaaaagatatggttttgtttatgttgatgtagataatttggggaatggaacatataatagatataaaaaagattcattttactggtataaaaaagtaattgcttcaaacggaagaaaattagattaagttaatattctgtttattcatttataaagttcattgattctttaaattggaattaaccataaaaaaagatgaacaaaagttcatcttagtgtttcaaatggtgacccgcaggcgattcgaacgcctgaccctctgattaaaagtcagatgctctaccggctgagctagcgggtcatagacacttaacagtgccatataaaaataacatagttttgaaataatgtaaagctattttgggaaaaaataaattaatttagcaatgtttttcttataatgatgaaaattgttataattattcagcataaagagaacatgaattagtaaaagaactagctgatataataaatagtcctaaagattttgatctttaggacttctttttgcttgggcgggaaggtcatatatttttcgtagctctgagatcgtttgatagattttaggtttataagtttttaaagcatttttttgataatatagagaagcaattttttgatataaatcataattatatttttttatacaattaaggaaatagggtttagtttgccctcgtaaatagagagtaccgggtaacacataatcagcgtttactttttttgccattttatataatccatttaaatttccgggttgatcagtgagataagggataattggcataatgtgaataccagcatgagctttagtttcctttttgatttggtcaattactttaaatcgttcaataatgggtgaacttcctggttcgatgattttacgtaagtcatcatcaacagtaataatagtacaagcaatattaacataggttatttttgataattcattgattagttcaatatcacgaaggattaatgatgatttggtagaaataataataggtgttttatacttaatcattaattttaaaatttctggcattatttgtaattgttcttctaaaggctgataactatcacaaacacccccaatattaactaattcgtgtttccatttaggtgatgataattctttttctaaacaagataaaatattctctttataatagatcgtgccaaaataatcattgttgtcaaggtatttatgactgtaaatagcataacaataaatacaaccatgttgacagccgcgatagatatttaaatcccacttaaagggaaatcgcccactaactttatttaaggcgcttttagattctaatggttgatatttcattttatcaccttctgatttaatcataacatattgcttgaaatatgtatgtaaagaatcgttgttgggaatattaattctacataattctaataattgttatgattaaataaaaataaaaaggatgaatggtgatgaagactaaatatgtgctagtattgatggcaatgatgtttgttattagtggctgtagggaagaggtaacaaaggaagtaggagatacaacgattaatattgcagaactaaatggcaaaagagaaattgataaaaacgataaaatatttgcgaataataatcagggtaagcatgatttattaatgttgatggctaatagtgtggatcattataatttaattagtggaacaatgctttcaacgttaagctatcaaggacaaaaaagtgaaagcaagtatatttttcaagttaatgttccagaatatcagtcatatatttatttagttccttcaaaaaatgaagaaagccaagtaacttttagagatagtgaaagaatgtatttttttgttggagatttagtgagtttaaataataacttagatgaattaatcaataagcaaatgatgacagttgaggatgtaagtaaagatgatagcttatttaaatataaagatttgacacttgaggaaagggttgaaaatatggatattagtcgagtagctaatgatttgtttggcgatgtagcaccatatttattacctgaagatattgcactcagacaaataggtactgcttataataattatgaaataaagggagaagaaaaatatcttaatcgagatacttatagagtagaggggaaaataaatgatagtctctataatagtgatagcactttttctatgttggtcgataaacaaactggaattgttcttaaatatactaggactacaaaagatagtctggtagagatgaagatggaaggtatttcgattgatgaaatgaatgaagagaatatgtatgctaaatatcttagtcaaaagtagaatttttactacttttttcttttttgataaaaaaataaatttttttcataaaaagggttgcatcattctagggataatgatattatattagggcactaagttgcttgaatagctcagttggtagagcaatcggctgttaaccgatcggtcgtaggttcgagtcctacttcaagcgccatggcctgttggagaaacggttaactcacatgcctttcacgcatgcattcacgggttcgaatcccgtacaggtcaccattatggaggtttagctcagttgggagagcatctgccttacaagcagagggtcagcggttcgagcccgttaacctccaccatttttgttataagccggcttagctcaattggtagagcaactgacttgtaatcagtaggttgagggttcaagtcctttagccggcaccattaaatatgcgggtgtggcggaactggcagacgcactagacttaggagcttgttcggaattgttagttctgttttatatgcatctcgtgaattttagaaaaacttaataaggaatacattatgcgggcgtggtgaaattggcagacacgctagacttaggatctagttccatcggagtgcaggttcgattcctgtcgcccgcaccagttgttaagtactctcaagtcctttatttataagggttttgagagttttttctttatatagccaaaattgacagaaaattaatattttaatttttttgatagaaaatagagttttaaatttgcctccgtaaattttcaattaaaaataaaattacaacttgcttgttaattcattaaaaactcataatacctcctaaatggttctttttaacttttgttatttttttgcctccacacgattttgccaacgcatgatatttaaaattatttaaccctaaataatatatttattaacaattatattttacctccataatgactaaataagactatcaggtaaaatatctagcatcatgttcgctgattctacttttgataaaatatctaaatgtgcataggtatttgcagttgtagtaatactagagtgtcctagccatttttgaactttgactagattctctcctttgacacacattcttgttgcacaagtatgtctcaaatcatggaaacgaatatgtctaagattgttcttttttaatactagtgcaaaatgttgtgttatatatcctggttttatacgatttcctaacttatcaacatagatataatcttgatatttgtaattatacgatcttccagctaattgcttatttgtggcttgatcgttttttaatttaagaagcagttcctcaaataactgtggaagtggataaaccctataactagctttattttttgctctatctttttccacttcttcaagtttaccattgatattagttaccgttactgtcgtaccaatcttaattgtctttgcatcaaaatcaattgcatcccattttataccaaccacttcttcacgtcgtaaaccaaagaatgctgctaaataaattcctaattcaagaggatcatcttttgcaacttgaaatagtttatttaattcatcttgtgaatacgcacttccagtgaattgaacctttttgggcttagatacttttttagatggattttcactaataagcttattttgcactgcataatcaagtgctttatgaatgtttgcatgccactttagtacagtgtttgctgaaactctttttgtttcaaaagcatatgaatagaaatcctgaatatcaaatgaagtcaaatcgcttaatagaatctcttgttctttaaaatatggtgctatacttgaattgatttgcattaaatatgttccatatgtgcttctttcataattatattgagttgcattaatccagtaaatcataaaatctgaaaatagcatattcttatgaactttaattcttttattcttagaatttttattaatcttttcaactttttggggtgtaacatctttaacttgcgatttttcttgaagcatatcttttgtgaagtaagatttaagatttgctttcttgtttccagttggtacttcaaatgcattgataagatatttaagcatagcattggcttgtttcttgtttcctctaactggcaattttgtagtgattgagggattttttcttttcccgttttcatcataataattcagtaccaaatgataaataccctttatttctttaagatgaccagatacttttttctctttcattttctcctccttgttcctgcgttccactggtcaacagtagtttaacaagaacaatatatatttacaaatgtgcaatctaatcattatcatttctaatttgcaaataggaaagaatatgaaatttagtaatataaaatgctctgccaattttgaagaatttaattttgttttctttaagaagtttatagcccgtttttgtactaataccaccaagcatcttgcacatagtttttacatcaacaacatcaggatattcgctaaacattttttcataatatgttaataagtcatttttcactatcgctaaacctcctacaaattatatttgttaataccaagactaataatcagtttactttcaatttgtttcaaatcatgatggctgatactgccaacatagtctcttaaacgagccttatctattgttctaatttgttcgagtaatacaatggaatcgctttttaagcccactgaaactgatattcgatgatgagtaggaagattctgtttactatgaattcttgctgtaatcgctactataatcgtagtagggctatacttattacccatgtcattttgtatgactagaacaggtctaatgccaccttgttctgatccaaaacttggctctaaatcagcataatatatctgacctctatatatttggttatacacatgtttacctccttccacatcctaaataggtatgtaaaagctggataaaactacccagcttgtttaaatcgttaatttatttgttttctatttttctttgtacccgaaaacatagggatgccattaaacgaacactagcaatgtcctcatgggaatttcacccttgcgtggaactcacgcaactgccatcaatgcctgcgacggttattatctcgctcggactatgaattgacagaagtatccccctgttaaatatcatcgcaaatagttgctaactattttctccatctcaatagggatcgctcaaataatagatattattgtcatggcgtattgactggctggctcatttaacaggaacgtaataatggctgttattcagttgtcaaagaactatatttagggagtctttatttgcccctacacaatataggcagtttgaacagccgattttggacacttttttaaaattattttagtttttttcttaaacgatgaattttcttataaattgatgaaagacttaagcctaatattttagatatttcatgagttgaatacccaaatatttttaagagaatgatggtcgatgtttctttatctattgtggatacataattaaataatgcttcattttctaattggcttaataaatcatcaattgtattaatttctttttgatcataaaaaggaatattatttaaaacagtatttatagttgtgttttgtcgccctctaaatctacgttctgatttaaacatttcccaatcgtaatcatgcaactgcctgatgatgttttcatcaacattcaaagatctaagcagctcttcttcttgcgatttccatttattccatttgattaattctttttgataattaaaacccatattttgctcctttcttgttttttaagaaaagaacaggtggggctctaattggataaagacaataactatcagcaattagaaaacaagttggatattgtattttcaatatcctttagactgataattaaaacattgtgtactttgcaaagcatttcaaattcttcatacaagtcatcataaatagatattcttttcttgcttgtaacaagaataagatcaatatcatttctcttgatatgtgtgattaatgacttcatatcatatgaattaaagtttttaccgttagatatactcttggtcactccaacaatcgagagatcgttgtcatcagcaagttcagttaatacttcttcctgataattcaataaatttcttgatgattcagctaatactctacagtgaatccatactctttgtttcttcatttcttttcctccttggaagaacacttgttcttcatccatataggggaaagttattgagatagtgagcaaagatttttaattttttcttgaattatttttctaatcacttttttccgatatgtaacagtagtttgtggtaatctaagtgtccttgcagtttctctatctgatagttcttttataaaaatacagattgctatttttttatctttttcaggtagcaaaagaatttcatgcttaattgcttttgctatatcttttaaatagatgtgttcaacaacatcaaaatgaatttctttattcacaacaaaaaaagtagcttgatcaatatcttcaaaatttaatatagatctagctactttatttttttctgtatttcttattttgtcataactgcttttacatactttatatactttctcgtttacctcaatatattctctatcaacttttaaataatactttttaaatcccttagaatcttctttaacaaagaaactattttttccataatcatatttaaaatttatcatttttctcctcctaatattttttaatgcaaaatattaggaggaggtgctcttattgtaatcataataatcaaaccctttccctaaataaatttttacacatttattaagagaagaatgtcgatgtgtgttagagtttatcaaataaatgtgaaaataaacgaattttcttgataatgtagatattttgatatttgtaatgaatattatataaatattgttttatatatttttagatggatataattatataactattgattaagagtaaaaaaaaacaagatattaataaatcaatgtcattaagttaagaagataagaaagaagtcataagtatagaatataaaaaatctatgcttatggctttattttatgtacacaaaaaagtacagtcttgaaactgcttttccaaaggtatataatagtcgtgtgttagtcaaacctatagttgaaacatacgacttttttggcagaaacatgacgtgtgcttgttcttcctggtcggacaggaagtatttctttggctatcaggttctcaacgggtgattttttacccgtttttttgtttagaaaccttcttatgatatgcgatgcccttgtaaaattaatttgatatgtatactttgtcttcttttttattatctttatatcctgtacaattctttgacaaaagttataaagtaataatcttgcatatatctcctgtttgataagtcttcttttctttgaatgtaatgcatgcagtcctatcgcatatttgacctgcctgaatgaagtttctattccccatcttttattatagagttcctttatatcctcaatagaaaactcatctctgtcaagattagttatgatgcattcatatgtatcttcagttatttttattcttactgttctacatcgaaaatcatagaatggtttttctttgcttagataatcaaaagtgtgattagatggtataaatctatatatttgtggatttgccttgatttcatttgtttgtttgattgttagtattcttgaaacatctatatcaaattcatcagtatcgggatatggaccaaaactcttcattatactcttgctggaagttatatctctaactcgtataagatatttatttccagaattgacgacatgttcaaaattattataggattcataacctctgtcagctatgaatatggctttatgacctttgtatctatccacaagttcattgaaagcactattttcgttaaagactgcttcaccctgaataataatatcatcataagtgcattctaaaagatcatagcctgcattgatatgaaaagctgaatatgtcaaatcctttataccttttttcagaagagttgtttccttgtcataaaaagtattgtcaatagattcttcactgccatcaacagctaaaagacgataacctttataagttttcagttttgaagtctttttattaaaattatcaaaaagagatttaaaagcatcaatcttaattttatttctggcctgtacaaaagctgaagcagtaggagtatcaatagaatagtcattaagcttcaataattcatctttcaaagaaccagcttccaaacaaatgatattattaatgatagtagagaaatcaagtttacgattacggataaaatcagtattaggattctcaacgaaaagagaacgagaattattcaaaatcttaatgcagtgattcaaattttttctaagagagttaaaattgttcataagtcatacctccaaaagttcatacctataaacaataggcttattattcataaaaaatatgaataataagcctcacaaactcatttaaatgtcaacacttttttataaaaaaaagaggataccaatatttttatatcgatatcctcaatatcatttccttaacttaatgacattgattaataaatatcctgtcatagtattttttgattacaatattttaaagcttaaacgcttgattcattttatttaaagaagaattgatagtgtttatagattcatttattttctttaattcattagcaaattggatatccttttcataaacacttgaaaaaatcttgtttatttggtttttgctgacaccctgaacatcaatcaattttctataatattggtttaattcatttgcgtttgatggaaaatcaagccttccgaataaaccttctacacgataaaatacatcccatttagatatatcataccaatcttcatcatcaacttcttcaacaatagataataaattctttttcacatcatctgaaaagtctctgatttgtaaagcataactttcactttctatcttatgatacataaaccatatctttaatgaattattcatgccaaaaattagacttaatataccgaatacctcaataaaatcaaaacctttattcttttcagcgtacccttttgtaagtgaaagcattctttcaataaatccattgggcattgtatatttatccccatatgcattatcatcattaatcattatattcataatactgtaaattacaaacctaaagtcttcttcttccatatatgttgcataatatccaaataaatcatgtatttctttcattaaatcactttgttctacatagtcatttaattttagatttccattttttaatgtaaacatagagtatggagaatgccaaccaccaaatttatgcataattgcatttccaccaataccaagtacaaggtctttgaaattttttggcattttacctttatcaaaagcaaatgaactcccatccaatattcctagtgtcgtagatgatctaatatatcttcgatctcctgcaacaggaaaaagtaaaatatttacaaaatcaaattcattactgatattggtgattttatttttatttttatcaatcaaatttttatattttgttaaaaatgcttgcccaaatccttgtccatcaaaagcatagatgtgctcaatttcatcaccttttaaaacacctacatattgtgctttattaccaccttttgaatgaccagtaacataaattttttgcccattgcttgcaaattcttttgtcattttttcataataatctaatgcttttttctgctggttagtatctgtaatatcagaataagcaccttctccattatcacgccattctaaatcaccaccagttcctttatatacaataattgtgttatttccataggaaatggttgcatttgttacatgctgagttccttttttatttgctggttcgttctcaacatttctgactttcatagctttatatactgaggggttcttttttattgtatcaataatattggaaaattcttcccttgaaatttcagcaggtttattagaatcatctattgaatttttattaaattgctttgcccaattgtatatattatcccctttattagtttgataatagttagtaaacgaggcatcataaataatagagtttagtataagtaattcttcttctgttggtgtagccataattaatcattctccttatactcataattgaaatcaatttctccccaatcatcatcaatttcaacttttaatccattagtagaataagatgaatgtgtttctattgaattataaggatcattaataacatatgtttcaaattcttttgccgaataacctagaaaatgaagatttccaatagaattaatcttttgtaaatctttttttaataaatttcttttttctagatcaatatcttcttccttttcagctactaaatatatagatactgacattgttatttgcttatttgcaaactttttaaactcattaatatccatatttggtctaaaacattctggaataggtccactattcattattcccaaattaaccactgcatctgggaaatagtgattaacagcattaaaaactttttcttcatactttttttgcattataaagcgtacataatcatcagtgatatcacctttacttttacgttctacaaaaaaataattatatgattctttacctttagggtaagcacgcataatttctttaccaccattatcccatgaaccatattcaatatcatatatctcaaattcttcattatattttttctcaatataatctaacatttcttgttttacttcttctcttgtcattactttttcttcttccatatttttgcatcctcctaatagtagacataaactgaaagtcaataatatcttgatttttgtttttttcatatcagtgcctcatttcttttgttatatgtttgatttagaaaatcttgataatatttttaaaatatcgaaatcttacaaagtacctttaaactataagctttatttccattttaagttaagttaaaattaatagcttggttttgatcaatttccttgaaatcttcattaatcatatttatatatgcgcttgtctgcttaagtatagaagaaattgtattagctgatgtatttaaactagataaaagatcttcaaacgctttagttgactcaccactacttgttgaaaaaatttcctccttaatatatccatctataaaagatgataattcatcacttaaactatcaattttttgttttttactatccaatgaacctgaatttattaaaagtgtaccagccactccattgattttatccatttttcatttcccctttttctaataaataaatttatctatctcatctatttcattaataaatttttttgattttccatctaatgttgattgtatattttgtaattccattaaaatatctttcataccatcacataagagtattaactttgagttaattaattcatcaaataaagactcatttggaatagttgaaactatttttatataagaattagatatctcaatcagtttttctaaatatgcatctataattttctctgcaaatataaattcttgatcacttatttttaaattacccattattcattctttcctttctcaataaatagttataattagatagttcttgctctaaatgatatttacgatgccttaaatcttctatatcattttctacttctctaatttttgacataatcatatgtttttcatattctttttgagaaagaattttttggctctgagatccatttaacatagactgcataaaatctttatattgagaaaagaatttcacttcttgacttttgattactgctacattaagacgatttctatgttcgcctatttgattattatatttaataatcatttgattatgtcttgtctgaaactcatatagattatctaaatctttatttaattgaaaaattcttttttcaatattgcgtatttctaaattgatatcatggatttgacttatataataagactccctactcatattattatccctctcctttaaataaataatagttatctaatttaatacaattatctcaaatttttcaattataaacaataaattttttattctgttgttatttaattaattcatgtaacaaaatatcatatacacctataaaattgtaagaaaaaacattaaattatttttgtaatgaaaaaattggaaaaatttggtaaaatatgtaagaataaactatctttgggaaaggggtgaattatcaaatgaaaaaagttgtttttgctatgctagcattatttttatcatgctcatttgtaactaatgcagtatacgctgatgaagaagacacattagatttaaatacagaagaagtgaaaaataagaaagaagattattcttcacttactgatattaatggtttaaacattttcactaatgatatggggtctttgttgaaagaaaaagaagaatcaaaatcattagaaaatataaaaactaaagaagttctatttactaatgattttcaaacaaaatcagaaaaaaaatcttccaaaaatagtttgtttaataaaatcgttgtttttgataaaactgcaactaatgaaaagacaagtttttcaataactccattattgattataggaactgtgctttttagtatagtagcgtttgctttaacacgtaaatattatagcagaagggagagtatacaaagtgaagataacaattacatttactaatggtattaaaagcattgattatgtgctaaatgaagaattaacgattaagatggcattagatattattgcaaggaatgaccaatttagtattccttctgaggtacgttatgtttattcagaaagaagaaatgagaatattagtgtaaatctttcgtttaaacaagcaaatatttattcaggagatatcattaaggtagttaagagtggaggagaggactcatgaatgaaataattaaacaggaatttaagaaatcaaagataaatgctacaagtgattttgatttttatcaaatagaaagaaaaagtgagcatttattagattgcaaagtttttagaacgttagatgaagttaattttgaatttcagcacaaccacgaaaagccatttgaagaaattagaaatttatcattaactttcaagtatcaggctttaataaacatacagtatttacttaaagattctaagcgtattaaaatctcattaaacccaaacaatttggtgtttgatacaaatatgatgccaaaagcaattatgagagatgtttatacaactgatacatatgatgaaaatgactttgtaaaacaatataaatcactaattggttatgttttacaaaataaatatacttttaatgattactaccaaggtggaaatcaattgctaagcaaaaacaaggcaaccaatgcatttgctgaggttacaactttaaatgggctattagaagtattaaacaaagagtatgctaatattcaagaaaagttacagcattcgctaattgaagtagataaacgtaaatataaaaggttaaacattttgaataagattgttattctattattagtgttatcgattactggtttagggtattttggcttctttagattaaatgaagaaacaacttttaaaacagcaaatgaagaatacattaaacaagattatatttctgttagagaaacgctagaaaatattaatgttgatcgcatgagtgtaaacactaaatatatattagcggtatcaaacatcaaaacagagtcattgagtgatgaacaaaaaaataacatcttagcaagcgtaacacttaatgcggatgaaagaattcttgagttttggatttatttaggtaaatcaaatatggataaagcgattgatcttgcaaaacagttaggaaatactgaatatactgcttatgcatatatgaaagaaaagtcaaaagtagaaaatgataaaaatctttctggtgcagatcgtgaagaaaaattaaaacaaatagaaaatagtttaaaagaactggatattaataatggtgaaagcgatgtttcatcatcaaattaggaggtacatataaatgaaaagaattttgcttttcaaagataaacaataccttgaatatccgtttgatgaaaaattggaaatagagaatattgtttttaatcttttaaataatgaagtatattacagctatgcgaataaagcaaatgtaaaattacttcctcaagaaaaacagcgtgttgaaaatatagaatttatgcttttaagcgaagatagtattacatatgaaaaagatattaatgctttactattaggacagaagaattgtgatattgaaattaaaacaggacgtttcattattgacaatcatttattaatttgtgattgcaactgtgaagtttatttaaatggtatattgcaaaaagataaaaaaatcgagttcgagtatggtgatcaaattttaatagatacaatacttattgttatctatgatggatatattagaataattgctaataaagatgattatcgcactgatcttcctttctatcatatgaaaatcaatgatagtgagagatttcctgaatatcaccgttcccctcgtgtgataaagcgattaaagaatgataagataacaattcaaaaaccacccactaaaatcacgcgtaaaaagaatagtttagtaaaagtaattgttccaccaacagtgatggcattaggaacagtggctatgtctttgatgatgggtagaggaatgtatatgcttattggtcttgctgggacaacagtcagcttagtattctcaataactgcattcttttctgagaagaaagaaataaaagaaaagaaaattaaacgagaagaagtttacaatcagtatctacttggaatacgtaagaaattagatacatataagcaaagtgaaatagaagctttgcattataatcatcctacaatgaacgaaatagctaatatgattcatgagtacaatcctagaatttatgagcgtgatattaatgatgatgactttcttactttgtctgttggaacaacaactgataaaagtgagtattctgttagtttagattatgatgtgcttgaaacagaaaaagatgaattattagatgaagcaaaagaaatctataatgaatatcaaaaaatcgagaataagcctgtaactattgatttaaagaaagcacacttaggaatagttggtgaaaaacatgaggtacatgaacaattaaaatggattttgtcacaaattacattttttcattcttaccacgatgtacaagttattacaatatataacgaacagtttaaagaggacttcgattatattaagtggtatccacatgtgaagattcaagcaaacaatttaacaggaaatatatattctgaacgagtaagagatcaggtattaggtagtttgcatcagatattaaaagatagaaagaacaaacgagatgaaaacaaaaaagaaatgagtttcttacctcactttgtaatcattattgatgattatcatatgataatgaatcattctattatggagtatctacaagaagaaacttctgaattaggattttcattaatttatacagcacaaaaacgtgcgaacttacccgagaacataaaaacagttttaatgatggaagatattgatactgcaactttattaataaatgaaggcgaagaagtcaacaagctattagcggaacaacgaattggtaatgttaatttagaattaatggctagagatttaagtgctttaaatcatatacaagggatgagttctcatattccagagtcgattactttcttagatatgtataaagcgaaaactcttgaagaactaaatattcctcagcgttgggaaaaaggtgaatcccataaatctttagctgttcctcttggattacgtgctgaagacgatattgtagaattaaatcttcatgaaaaggctcatggaccacatggccttgttgctggtacaacaggatcaggaaaatctgaaaccattcaaacgtatattctttcattagctgttaattttagcccatatgaagttggctttctattaattgactataaaggtggaggaatggctaatctatttaaaaagctacctcatcttcttgggacaatcactaacctagatggtgctgaaagtatgagagcattagagtctataaaagcagaattatcaagaagacagcgtatttttaatgatcatgaagttaataacattaataaatataacaagttatttaagaatggaaatgcgaaagaaccactaccccacttattcattatttctgatgaatttgcagagttaaagaaagaacaacctgaatttatgagtgaattagtatcagtagcacgtatcggtcgtacattaggtgtccatttgattttagctacacaaaagccaacaggagttgtggatgaccaaatatggtccaactctaaatttaagttagcattaaaagttcaagatgaaagtgatagtaaagaaatcattaagactccagatgcagcttttattactcaaacaggtagaggatatcttcaagttgggaataacgaaatttatgaattattccaaacagcgtggagtggtgctaattatttaacagaagcagaaagtgaaaaaatcgatgatcgtatttataagattaatcttcttggacaaggtgagcttattaacaaggatttaagttctgataacactggaaaagacactacaaaatctcaactagatgctatagtagattttattgatgattactaccatggtatagaacatcaagaagttactaaaccttggttaccatcattagctaaaaatatagcaagtccttatatcgatgatattaaagatatatcatcaacaaatgaaattgatttaaccgcacatattggactaattgatattcctgaggaacaaaagcaaattgattactctattaattttataaaagatggaaatcttgccattttcagttcaagtggttttggtaaatcaacaacggcaggaacaatcatgttatcattagcagttaaaaataatcctcaattattaaattattatgtacttgactttggtaactcatcattgattccatataagacactaccacatgttgctgattatatgacattcgatagtgaagaaaaactaaataagttccaaaaaattattacagcagaaattaaagctcgtaaacaattatttggaaaggaaatggtacaaaatttcgatatgtataatcaaatgcataaagataagccattaaaagctatttttatggttatagataactttgacgttgttaaagaaatatctatggattttgaagattttatcactaaaacaacaagagatggttttggattagggatttatacaatcataactgctaccagatcaaatgctgtaagattttctatcctcaataactttaaaaacaaagttgttcagtatttatttgatgaaggcgatgttatgggattattgggaagaagtaaatacaaattaaatgatgaggtaaaaggtcgtgcattaattaaacataaatatattagtttaatgcaggtatatgcaccagtcaaatttgaagatgatgttgaatttattactaaccttaaatcaacaattcaaaatgtagcagataagtatactggtgagaaattaataggtatacctgtacttccagatatatttactactaaggactttgcaaattacaagtatgaatcaacaaatgaaaaccttattggattaagtcttgataatgtcgaaagcgtaagtgcagatttatcagactctccttacttagttgttggtccatctaaatcaggtaagacaaacttccttgaaattctaatgagtcaaaataatgaaaaagcttatgtatttgactcagactcaatggcattatataagtatagagagaaatttgattacataaataatgatgaagaaattcaaacctttatagaagaacttactgatgaaattgaagatcgcaaagataaacttgaggatgctctaaactcaggcgaatatggcaatccaaaagagttttataagtctttgccaagtattagtatctatattgatgacgttgatcaatttattcaaaaagttcaaaatataccaaacatagtaaaaatattagaacaatctgctagtgcaggtattcatattattgctggagttaattctgcaaaattgaaaggttttgatgaagtatcaaaattctttaagaattcgacaagtggtgcagtacttggacaaatgggtgcattaagtatgttccctatcaacatgagagatatccctacttttggctatgctattttatgtaacaacggagaacttagaaagattaaacttcctaagttcatcgaaagttaggtgaatagcaatgaaaaaatatgtaaaatattttggtggactgactcttattgttgtaactcttgctattggaatatatttaggtggattattagaagaatctaaaaataatcaaatcaatggtaatttatataacagcacaaaaatagctattgttaatttagatgcaggtgtgcaatatcaaaatgaacaaagaaattttgcaaaagaattattagaaaattattcagaagatttttcaatgacaggtttagatgacgcaaagacaggacttactgatggaagatatgcagcttatgtcattcttccttcagatttctcatcaaatgttgtttctattaatacaactcctcaaaagagtttgttaaaatacgaagtaagtggtgatttatcacaagaagcaactgataaggcttggcaaaatgtcatgaagcttaaggaacaattaaatgatgatgttggttatgtttatatcagttccatattaagtgagttccatgacggacaaaataacgctttaaaagtattatcgaatgattctgaagataaggaagtcataatggccatttcaaatttggatttgattgctactttagatataactgaagttgaacgcttacaaaataatattgaggatttagatgtaagtcctgattttgaaacgaataaagccattatttctgcaattgacaatgcatataaaggatatttaaatgaaactgcttctgaattatctactttgaaagaggaaggtaatagtgttaatggtgatatagcaaatgtattaaacaatgcaacagctattgaaggtgtttttaaagaagatgataatccgaattattctttagatagtacagaaactcaaatgactttatttaaaacattattaggaacaaacatcaataatatagatggcttaataaaaaatgcagaatctagttcagcaactagtacatctactttaaaagataaagtttcaactaaattagatacattaaataatgaaattattaaaaatcataatgatgttttagaaaaacaagctagtttaattactagtatttatcaaaataactttatctcaaatatatcagcatcagagaacttaaaaagttatactgagttgaataaattagcagaaaattatgataaagaaatatctgattatatagtatcgcaagatagagtgatgaaaaagattttggaaggatgcaataattatataagtaatcctcctgttggcgtgaatgaaagtttgaaagatcacttaattattctatatgtgaacgataaacagatgcagacagatatcaaaacaatagcaaaatttatgaaatatgagaatgctgataaattctcattaatggattatttaaatcgctattatgatgaaaatgaagcagttccaattgaaaacgtattaaatggttctccatcacttaaagtcgatatgcaaaatgcattgcaaactgatttaacaaacaaatggaatacagcttctacacaagtaagcgaaataaatttggacgatacgttaagtgatgatatgtcaaagcaaattagcgatataaaagcacagttaggcaatctaacaggttttgatggtacagaatttaaaagtggtgtaaatgggttaatgaatgtatctaatacaatgtcctttgatgttgttaatgatttagtaaaaaatgatttaacagcgttaaatgataagcaagctacacaaaaagcaaatttattgaatacggttcatacacatcaatcactgatggaacaattaacacaaaaccttctttcttatgatccattatctaaaatagatgatgaagaaattgaagattatgttaatgactttgataagaataacacacaaacgcaaagaaaaattgaagataaaaatcgtgagtatgtgaattttgttgatgattcatatagaaatgcagatgagcaagtaagaagtttacgtgaagatgtaacaaaatatcaacaagaatctgatgaaaaagtaacaactggattagaaactgccaaacagaagaaagaggcaacttcctcatcaaatgcatcacttatgaatagctatgtcaataagttaccttatacgagaaatggtactgttgaaaatactgttgtctatgattttgtaactgccccaactgatatggagggtttaaaagcaaataattcattaatttctagttcatttaactaccaattcattttaataggaatcagcagtattcttattttatcttggattattatgtatgctgtttcaaaacgacataagaaagaaaactaaaaaatagtatagtattattagcaaatgatttaacatgtatatcgcttttatttataatgtattttacatttaatggaaatgatattggtagacattactaattattttatgtataatgtaatagaaaagatagaaattacacaaggaggaaattaatatatggcaggagtaattcgcttaaatgcagaaggattaactaattcttctacacaacttaaaggaaaaggaaatgaatttgaatcatggataaatgaagttcaagcattaattaattctttacctgaatcatgggaaggtgcagctgctgaggcatatgcagaacagtttaaccaattaaaaccaagtttaattcaaacaagagagttgattgaaacaatcgctactcaaattgatcaaactttagctgcagcacaagagttggatgctaatattgcttcaaaattaggataaactagcaagttatgttaaggtatccctcactaaatttttgtgatgggatactttttttataaaaaggaggagagggaaaatatgttttgggatacatgggattattggacagatgatccaaaaaccaagaaaattaaatcatatcgacgcaaatctaattattatgaagaaaaatacaattcactttcaagttcgttaacaacaattaatcgtttgttatccgatgcaaaacagaattataaattaataggaacgggaattacttacgttaatgatgatgtaattaatcgacgttattatgatacagaagctaatctatacaataaattatctaatgtcataactgatttagaaaattgcagggatataataagtacgcagaaaaataatgtatataatttatatcaaacatattatagaaaagctattaaggagtagttgatatgagtacaaaaatttatgttcaagaagaaatgtttgataaggcaaaagaagtaaaaaaggcttttaagaatgattttaaagacagttataaagaaatgaaaagtctgtatgataaaatgtctaatgataaaggatttcaaggaaaggcatgtgaaggctttattgaattatttgatattctattacaatatcataaagatttaatagaggaattacctgatttttttaaagcttttgaaaattatgaagaatcattagatgaggtcaagtctacatctgtttataaggagttagattaagatgagatacagtgaaaatgaaataaattttttatgtaggttaataggctatggtagattagcaggctttgatactttctctatgttatctaaaaaagatagtgaagaagttgtacaacaatttactgaaaagaatattattgaaggtgatttactgtctaaaacaggattagctttaattcaatttattaaattatatgcagaatcgaaaatctatcttaagattggtgatagtatgtttgctaattatcaagatgatgaatatattatgattagtaaaaatgatatgacttatacaattgttcctttaaatcaagatgaaatcgttgttactttactttcaaaattttctgataaaatggaaaatattgaagatggaaaagtaagaaataaattgatgacaaaaagaagatttaaagaatttatggatgagaatcctgacatacctgcaattttctattattatattgatttagataaaaaagaaaacagggatgcggtgttgttttatgctgacaataaattacaacactataatgggacattggaagaattgactatttatccaaaagaatatgtacaacaaggaatagagtcaatctttcataaggaggtaggataatgggtaatgaaataaaaataaatacgcagattcaatcatatgctgaagattttatccctaatgctcttaaaattaataattttttgaatgaattaagttcactttattctgatgaactgcgtgcatataatggagaagcaaataaggaaatctctacatatagttcatctatgcttcaacaaatagctgttttaagtcaaaattatacttgtctatcaaataatttattttctcttgttgaagcgtttttagagtttgataaggataacgaagaaaaattaagacaattttattctactattattactaagagtggaatgaagatagaggaataaaatatggcaaaatattatatttcaaatgaaaattcatggcaaacacaaaaaaacaaacaagagaagatgggacaaggaatagatgtattgtatgatatagatagatggttggatagagcttttagtcaactagaatatgataaatatgggcttatgacaagaaattcgtattcaagtagaagaacaaaaatacaacaatgtgataaaaagaatagtatattatataattattctaaatctattcatggcatagtagcagataaagactttcagttctttaaagaattgaataaagcatatgaagaattatctttattagatataaaggaatatacaacaaaaaacacattgaatatcaccgaaaagaaaacaataccaatatcttattattcaggaagtatggcatatcaatcaggaacagcgacttcttatgaaacaagagatgtattaaaaggaaatattaatatatatgatatccaaatgaaatgtgatatgtttcatattgaagaacagttaaaagcctacttagatacaagtggggaaaaattaagtgataaagaaataaaagaagcaaaagagaatttttataaagaaatactaaatacatcttttgagcatgaagtatatgctgatgatttctttaaaggcttatccaccacattagacttcataccagttgttggaggagttaaaaatgtgattgagggttgtacaggctatacgatgacaggagaaaaactgagagatagcgaaagagcaacctatgcagtattaggaacattatcaaccacacttgatttagtaatgtttggaacagcttcagggttaatacaaagtggaaagtttgtaggaaaagaagtagcaaaagcatctataaagcaagcaacaaaggtggcaatactagaaacaacaggatcagttgtaatgggatggacatcacagtttgcaagcgagaagttaagagatatgggattaagttcagaagaaatctttgcaatccatgtacttgtaggtgtatcaacagttggtgtaagtaagtatcaaacaagaaaattgtacgataactgggatgattttaaagaagttatgtatgatgtaggaaagagaacagatttaacagataagcaaaaagtaaataaaattaagaaattatttaaacatgtgggagataaaacagatattaacattccagaacatgtccgctatttaaaaggtttctctaaggagggagtaccaatatatgattggcctgataatttaggatttgatatatctaccatacaaggaataagcaaagagaattctttgccacttaaatgggatagatacggctcattatatggcacaaattttgcgacaaacagtaatccaccttatacatatagtgaaagagcacttccgtatgtatttaatcaagatgcatatcatagtggaaaatttgttacagaaacatattttgataaaattgatgcaataaaaaataacgatttaaatgctttaaactccatactatcgatagaagatatcccaccagtaaatagtgaatattttgagaggttgcaagaaaattttagaaactataaaatgagttgtaataatcttatagactctgattatgggatttttggtaaagctaacgcatgggataagctgtcaggcggagcagatcaaattgtaactcctctaaatggagtgcagtttgagagattaggaatactaattaataaaagataggttgaggaaaaaagacatgaaaattaataatcaaaaaattgaaaaaataaaattgttagaaaacaaattgaataattatacagtttatcttaataaaaaaggatatgcatggcctggtattggatatttttttgataaaaatgactcaaagtggaaaattttcgatacccatgaaaaaggagagttgacttattcttatattgcagagacagaagatgaggttatagataaattattgaaagtcctggaagtggagtatgatgcacaacaagtcattataaaattaagaaaaagaaatagtctatctgaacgataataatcttattattgtatgcacttgtataaattatttttgatgtggaggataaattcatagtatatggagtttgttatgctagataaatcaaaacaagaattattgaatgaaataaaaaatgggcatgaaacttaaaaatataagatttattataatcaagagggttttatgtggccagctttaggatttttttgatgaaaataaaaaaagtggatagtgtttgaaactattgaacgtacaagtccatgtgtttatttagaaactaacgatgagctagaagctgtattaaaattgtataaaaaagtttctaccaaatacgaaatacaagaaagaaatcgctaaattgaaagatagtcaataaaattaaaagtcttattttagattatgttaaacgcataaaataagacttttcttttcatttttagttaggaataaaatatagtaaaatattatatttgaaatgaaaattcatggctaacaaaaaaaaagtgaagatgggacaaggaatagatgtattgtatgatatagatagatgtctagataaagcttttagccaattagaatatgataagtatgggcttatgacaagaaattcgtattcaagtagaagaacaaaaatacaacaatgtgataaaaagaatagtatattatataattattctaaatctattcatggcatagtagcagataaagactttcagttctttaaagaattgaataaagcatacgaagaattatctttattagatataaaggaatatacaacaaaaaacacattgaatatcactgaaaagaaaacaatatcaatatcgtattattcaggaagtatggcatatcaatcaggaacagcaactccttatgaaacaagaggtgtattaaaaggaaatattaatatatatgatatccaaatgaaatgtgatatgttcgtattgaagaacagtttaaagcctacctagatacaaatggagaaaaactaagtgataaagaaataaaagaagcaaaagagaatttttataaaggaatactaaatacacatcatttgagcatgaagtatatactgatgatttctttaaaggcttatccaccacattagacttcataccagttgttggaggagataaaaatgtgattgagggttgtacaggctacaccatgacgggagaaaagttaaccaattctgaacgtatctctatgggagtatttgggacactgtcacttgcagtagatgtagcaacattaggagcgttatcagccacaacacaaggagcaaaagccttggccaaagaagtaggaaaagtggcatttgcagatattgttattgcaggatatggaacaaaatacacaagtgaagtgatgagaaatctaggaatgagtcctgagcaagttatgatgacacatatggtaacaagcctagcagtaggaggatattcaagctataagaattataaaaaaaatcttagtgatatcatgaagaatgcaggactagataatatcgatcaggcaaaagatttaatgaagtatacaggtttatcatctaaagatttagcaaaacgacttgaaaatagcagtatagagagtatactaggaatagataagaaaaatctagattatctcatgaataaaacaaacatgagtgaagtagatatactaacagaactcaagaagcaaaatatagacatagataagataaatggattgaatgttgatgagattttgaagaaattagataaggagagtagacctaaatttgatatagacattgcacaacaaaaattaaatgaaatcagaagtaggatgccaaatcaaaatttaaaaattagaggtaatatggcaattgcagatgttgcagttgaaggattgcccaatgaatttgttgctcatagtaaaattcataatcttgccagtaaaggtgctaatgtagataatttttcatttacgcgtgagaataaattttttgaaacatatgttgatgatggatttcctagatataatgatacagaagcaaaaatattagaagatattgcctctaaaataaaagatcctaatatatcgggaagaattaatctttttacagaattgcctgcctgccaaagttgtactaacattatatttgaatttagaagacgattccctaatatagaattaaatatatttacaaaataggaggacatgaatatgaataatatgtcatatgaaattataaaagagatgcttattgaagattacaatgattttattgaaattgaatcatattcaattaagcaagctattgcagcgttattagaagatagtgtaattatgatgaatgaagatattaataattatatttctgtaatagtcattttagcaaaaattagtctagaaagtaatataatacctaattatatcttagaaagatttactattttatcagatgatatgattaaactttataaatataaagaaattcctgaattcataaatgataaggcttatatcgataataagttaaagaaaaaaaatattgaaattattgatgatgaatataaagaaagggtaaatattttattaggtaacaattaaattttatatagaatgatacaacattatattgatgaatatttagcattatattgctgagatatttttcaatataatgttctcttttttaataaactgatttttaagttaggtatatgcccagatcatactatagtagaatatcaggaagaatagaatgctataaggaaaagaatgaaaaagtatggaattatgcaagtactattcatggaatattatctgataaggaaaatgactttcatagagcattgagcgaagcaatagataagattcctaagggatttatattgcatcatgatatagataacggtgtatttcaaagtaaaagaaagtattcatagacagtttactcactatggaggatattattttaacaaatagcgaggaaggaaaaaaatgttaatatcaaaatttaataacgatggaataaaacaagcaataaatcaatttgaaaaagagatagtaaaaattccaagacaatataaggactttctcattaaatataatggtggaagaacgccagaaacaacttttaaaataaataaagtatattctgatttagtatgtttttatggtttaggcaatactgaagaatattatgattatagtaaaattataactagaagtagttttaaagagtttattgaagaaggatatctaattattgggtataattcttttggggattacattttaataggagtcaataatgaaaataatggaaaaatttatttttgctatcatgatagacctaaaaaatatatagaactagcagaaaatttttctactttcacaagtaagtgtaaaagtaaaaaaataggttatattgaaagtgtagaagaaaggaaagcatttttaataaaaaatggtaaagaaaaaaatataacgattggattaattgaaatgtggcaggaagaaatagatgattatgcaaatatacatcaggaaaaattgattttaaatgaagaaaaagatttagaaagataaacttaaaatagcaagactcccttgagtcttgctattttatttagaagttatatccaattggttaatactaattatctttgggaatgtgaagaattatgtgtaagtaaaaatcgacaggtttagatagtagatgacgaatcatgtctaatcatcatctgtttatgtattatcagtatgcccaattcatcaagggttatactgatttttttatatgcctttatctttactcattatgcttctactgcttccataatggcaagttgattttgaatcatatcccagtttcgacatctctgtgtccatttgctgctgaggttctgaatagccaagtaaagcatctttctcaaactgtcatcatttggaaaaaccgtctttgttttcgtgacttttctgaactgtctgttcaatccttcgatcgcatttgtcgtgtaaatgattttgcggatttcaactggataatcaaagtatgtgcttagtatatcccaattctcttcccagctacgtactgcggttggatattgcttgccccatttatccttgaaaattgctaactgattcagtgcctgttcctctgtatttgcttggtaaacagtttttaaatccctcatgaactccttgatatgcttataactcacgaagcgtgtgctgttgcgaatttgatggataatacaacgctgaatacgtgcctttggatagacagctcctatggcttctctgaagcctgtaagaccatctacgcagaacaaggaaacatccttaacccctctgcttttcaactcattcagcactcccatccagtatttcgctgattcactcgcacctacccacaatcctaaaacttccttcattccttcgttgttgatgcctaaaacaacataggctgctttggtcacaacctgatgatcttctctgatcttataatggatcgcatccataaatatgaatggatagaaggcttctaagggtctgttttgccattctgttacttcgggcagaatgcgctcgctgatcttgcttaccagtccttctgaaatctctacatcgtacagtcctttaatctgatctttgatatctcttgtggacattccagtagcatacaaggaaaggatgcgctcctcgatgccatcggcatttctctgatatttcccaatgatctgcggctcaaattcgccgttacgatcacgtggtacgtttacatctacttcacctaattgtgttttcattgtgcgtttcacagtgccattgcgatagtttttcttcccttcacaagatgttctttcagcgcgatcatagcctaaatgctgatccatttcagcctgtaaggtctgttctaaaacatccgcaaacatgcctttcatgcactccataatgtcctgtgttgatgtaaacttttgttcattcacaaggtccttgatctgctttgtcgaaataaaagatgtgttcatagtatttttcctcctgtaagtatgtttcgtatctacattcttacccgctttttactatttacacatcttttgctatattcccttatcttttaaaatcagtgatacaaagttgtatttcttttaggtttttagtatgttccatatccatagataacataactattaatagtataagtgttttgtttacattgatcattagaattgccttctactgtgtaaataatattattttctactttttcaacaataccaacatgatcactaataccatctcgttgccaatcaaagaaaattaaatctcctgtttttggcgtataacttttatctttccattggtctttatcctgatagtattttataccatctctcactgctgaaaatttgggaattgttatatcaagatcacccgattgataggctacccaacttacaaagcaggcgcaccactcaactcgttctttatatccataccatgaccaataaggtgtacctccttgattgcctaattgtgatatggcaatattgacaagattgctgttgcttgtacctaaacttgcaaattggtaatacctcataacatgaggcacatattcaggatccccatagctattccaaccatgcttacgtgcctgcacatcactaaagacttttgcatttccttgagagtatgcaccaaaattagttaaagcccattcgatatagccattaccaaagttatatccctgcattgctaaacttaataagggaatatctaaaggatcagtacagtttgctcttttaaggcagtctgcaaaattttgcacaccaacttgaattgaatattctggatcagttatagcattgggtgtattaggaaactttgtgttaaaggaacattcactagattgcataggatcagtccctttaccacctgattcttgcatcataattgcctgtaatgcattgataaaatgaggtatttcatattcatctgcatacttttggatgattggtgtatattcaataacttcctttgatagctgattaccactgccactgctggaacttccagtcataaagattccaccaatcaaagcaatcagtaatataataaggatagcaatccagccaattgaacaaagaaatgtaagtgatgttcttgttgtatcgataattcttttaacagcactgactcccttttttgatactgaccatgacttacgtcctatggcttttattgtatgataagattcttttgatacttgagcagatttaattgctgactgctttgctatttcctgagaagtttttatagtagttttagaagtgtttttaattgttttaccactactgatagaatctttgatgtttgatttggtatttttgatttctttttttgtctttctgtttgtggttctgatatttttttgagcatgttcttttgcttttatttttgaaggagtatcactgctactatctatatcgtctaataccgtatcttttttggattttcgtttacttttgatataacgatatcctttttgcacttgtatctttgtttcaattgctgttttatttgctaaatgtttagcattttcattaaccttgctaactgcataatcattaggacttgtgtgttgaggttgtgtattttcttcaattttatcttttgtttttgatgatatattacgaatatgttctccagcaattaaagccttatcaattgatttgacatctttgatgatatctctcgttttaattgatttgctcatctttctttacccatattttttcgataaggctgttctttaaagtattcaggatatcgtagtttaattgcttcaaaaaaatatggagcatattcgcaagcaaataactctgatggcgtactctcattctcatagccatcttgtgtgtaaccgttccataaattaaaggctaatcttgttgttaaatctgacccactggtttgccatggttgatttaatccattaatgataatggaatcatcttttttattatataattcatcaatatggtatcgacagtctttatcaatactaagcgtatagaaaagtgaaagatgatacgtatcattgtttttgcaaccattaacaagtgtataaaaaaattgttcgtgttctcttgagttgaatttcataattggtttctcctatcattaaaaatagggacagattatctctgtcccagctgtatttcatttttactttttacctttgtatttgttggtttggtattggttttctttatatcattaagttcagatttcactgatttttttgattgtgaatttttttctaattcagacagagtagttataacactatctgttttaactgacatctttgtaaatactgacatacagaaaaataaattttcctgtgtttttgatatcaaacctttgttagtatcacgaggagttgtttcttttgatcctttaccaataaatattctaccaatgttttttaaatgtgaattagcttcgtgaatttcattaccaagttttgataattgatcaatattttgatccattaattcaattgaattgtctaaaccttttttgatggtttccatcattcctttaacatttagtttttttatggctgaatttaaagctgatttaccttgttttttaaattcattaacagctttatcaactgtttttataacatgctgttttaattttattaaagagttctttgcatcgtagacttttgttgtgactttatcaacagctttatttgcagttgcacgaaatgtcttgtcctgaatagaatttaattcctgttttacatttctcagttcttctagtactgtatcaaactgatactccatctgatcaatatattgtataagataatcaaattcctttttttgatcactcataccgttttcgttaagaagctgactaaatttcttgatgttttcctgttgtgctaatggttgtttttccataattaatgatcctttctataatgtggaaagatagaaattatctttctctattttcatttatttttttcttttgacttgaacgctcattcttatcattaaattcagtggttaccagattatcttcattcagaataatatcaccattatgatatttatgtttgatcttaaggattgcttctcttaatgaattggcttcaatctggcagatatgacttaacgtttctttgatctcaatgttatatttattcatattgttttcctttcatagcattttgacgatctgttggcttggttgtcattaactgatatagtttggtatcttttgggaactgattaataaacggaactaatgaatttccatatttgattagaccacacccagcatcagcattagtgatataggacatttgttcatcactgatacttaacagtttggcaagtttttgtctatcttgtgaagcctgatttaacataacaataaattcagagttggataacattgtactagcagttacagatgctaataaatattctacattttgggtgattcctgttggatacccatctctttttctgaactgacgccatgcactgttgaaaaaggatgctgaatactcattttcaaacacgacatgaaactcatcaatgaacacatgagtacgaataccttttttccagttatctgttacacgatttagcattgcatcagtaataactaacaatcccattgttttcaactgttttcctaaatccatgatgtcatagacaatcatacggttatttgtatctacgttcgttttatgggcgaaagcatttaatgagccatctgtgaataattccatttctaatgcaagattatctgcttccttttctggctgttctaataatttttctcttaatacgcataaagttggtagcttgccaccattttgataatcttcatagactaaagcaacacaacggtcaataattgatttctcttttggtcctagtccatttttatccaactgttcaaacaatgataaaataaattcagacttatcaataactggatttttaccttcaccataaccttgagtcatatccatagcgttgatgtggtcatcactacctgctgctatatggataacctcgccacctaatgctttaataagtgctgaatactcattttctggatcgcatactaagatatcatcattggtacttaatgctaaaaatacaattagttccttagcactgaatgatttaccagaaccaggtactccaagtaaaaaggcagactgatttaacagattctccttattaaccataatcagattatgcgatattgcattttctccatagtaaataccatctttatccatgatttcttgaactctaaaaggatttaatactgcaagactttctgttgtaagggtacgaagggcattgatcttacgaacacccattggtaaagcggtatttaatccatccaactgctgaaaattgagaggagccatttgacatagatgtttgcgagcagttgttaataatgcttcactgtctgtttctaactgttctaaactgtcagctgttaatacaaatgttaaaactgcaaacatcattcgctgatctctggtggttagatcatctaaaaattccttagcttcttttctctgctgttccatatcgtaaggaattacagcactaaagttattgctggcattttgacgtctttgccagttggttatatttgtttctacacctaataaacgattttctacttctcttactgcttcatcagttggaactggaatcacatcaatgctcatcatcatgttatgattcatatccgttagttcagcaatcatgttgtctttaatataactggcatattcctttaaaaagaaaacacgaccatatcgtgttcccattgtaaaataatcttttttaaattcaaaactgtcaggacagatatagtctttaaaatcatgcccttttctcatcagttgtttaaggtcaattttgaaatgagtttcctcaccagttcgatagaaatcatgtaatatctgtaatcgctctacagcattcaagactttacatttagagtcaagtcttgctagatgtgttgtcatatccgtagtaactcgacgaaaatacatttttgcatcttcatagttttttctaaatatagatactgttaaatacatttctctaatcataccattcgttcccattgctttatctagcaacatttgattatattcttcacgatactgatcaagactgtcattcattaaaggcaatagaatttctttttcaaaattctccttatttaatcgtcttaatgaaattgttattttagtggttgcaccactatcaaatgaatttagtaactctgaatattctaaaaacatagcttctttatcttcacaagaagcaactgcataattgatatcagtaaacttataagttaaagaaaacttgttttttcctacctgaaagataccatcattatagatggtatcaacaggaataacctgttgtactttttttggcactttaaatttttctttatcctgcttggttaaattacttaacgtttttatcacgttttagtacctctctttcttttttatttatatagggaatcattgcttcccagtaaacattattgctttcaaatttaatttctctaggaatcagtagttctgatttaatccatgcccatacaaactgctcagcagtaagtccattataggtaacaaagcctaatgcagcaaatggggaagctcctaaaacacaaaaccatgataatgtttctaatccaaaatagggcttcattataaaatacagtagcactgccataagacaggctaaaattgaaaaaatgaactgtctaagtgacagtccaaaataaatagattctgtataattacggatttccttgtttacttttacttccataaatattcctttctcaaaaagaaaaaaagaacttaatcaatattaagctcttaaatcattcttattgtttttgtttaaatgataacatcttttccaaatagacaattcctttagtttcatcaatagaataataaaaattaaagggaatttttgatgaagtatacttatataaatatttagaatatagtggtgttttaccagcgttctctgataagaaagaagcaacatacaatatctcatttaatactttttgagcataatcataatttttaaaatgctctatacagtatgaatcaatattgtttaatgtttcatctatttcttctgtaatgagtactttataaaccatatttcaactgatgttttttagcaaaatcatcaacactcatagtttctatttcaccattcataagtctttcatgctgtatatctaactcttttttaagttctatttctttgacaaagtcatttagttcgtcatcagtcataacgttataagaaataccatcaaaaaccatttttctaatttccatataaccaactccttttctatttgtagtataccatattctttgttttttgagtataaaattgatgaattgaaaataaatttttataaacccatcatttctctaacaacacgatcactcatcttgactgccccaaccaaaacaatcatattgaagataagttcaccaacataactccatacctgagtaacagcttgagcagtttcatctactgctggtggtgaagatgcaaaaagtgaaaagatgatacatgctaatacaacaatagctccttcaagacagactgcgcagtatgatttcaaaaatgattttccaacattctgcgttggctcaccaccaaatgtagataacggaactggagcaattgcggtataaagataaagtctaaaaaatcttccatacacactcataatcatgacaaaacttaatattgtaatgaacaatccaccaatcaaagtaactgcccatagaggtatagagttaaaaaaactaacatcttctatggcagtaataagtgaatcaggaagaacagtatcagttgcagcaccaaatccagcactgttcataattgttgatacaattccctgtacaatttcaaataatgctatcataagttccagtccataagtgacaactccttttgctaatgcaaaacgaataaataactttagtgcatgttcaggtttcttgacttctgcgaatgatccacacgttttcattacaccaactacaaagaacaaaactaatagggcaagaccaatggccattaatgcaccattgatctgctctataacttgccaaatgcctccacctttaaaatctttaggcgattgggtaataatattccatatttcagctaacttttcattccaagtatttaaagcattttgcaggttttgaacgatccagttatcactttccattagcctgcaatagtattcaaaatttctttagcgaatgtaataataacaccacctgcaagtgtcaagaaaccattcgctctttgtgaaggatcgtgtgatttcaaacttagaccgatttgaacaataccaaaaccaagcaagatcataccaattgctcgaatcagtccaaagataaaatcactaagattattaataaccgttagtggatctccttcagcatgaactggtgtcaaacctagtgtaaagaatgcaactaatactacatatataataaataatactttccctttacgagatagtgtttgtttttcatttttcatttcataattcctccatattttttattcatcagcaaaaacaaattcagtatcacttaaatcaaaatctaaagcctcctcaatatcataactcaatgatactgaagcaattgcttctgttatttctccatgatgatattcaaaatctttattaccactatctggtgtcatagaaatatttggatgatgggttatctcatattttttatccatgatgggacgttcaccgcgaataaataaaatagctagttcattatctaatagccttacttcatcaggcgttagtaactcacgtccattattttgataattggtagaatagttcccactatgacctgtgcttttaccataagtgttggtatctatggttgctttacctaatagctcagatacatatttatgagtgctttgctcatttcctccgagatataaaaattcatcacagtttcctacgatagattcccactgcttttcaaataatgcttttaattgggcaagattttggagaataatcgaaactgacacttctcggctacgcataacagataaaattttatcaaagtcatccggcaaactgacgttcgcaaactcgtccattaaaaaatgcacgtgaacaggcaatcgtccatgatacttatgatcggctacccagaacagttgttgaaacagctgggtatataaaatggagattaaaaagttgaatgatgtatcgttatcgggaataattgcaaataaggcaactttcttttcaccaatacttgtcatatctaactcatcagtttgtgttaatttagataaggattcaagattaaacttttccaaacgtgccgctaatgtgatctgaatagattttaatgtttttgcactacctgaatgataatctcgataatacttaaccgcaatgtgattaggatttcttttttctagtttaaagaaaagaatatccagtggggactgataataatcatcatcttcatgcacttcaccagctctaagcatttccataaccataggaaagttttgctcatcttcaggggcttcatatttaagataaaagatcaatgctagtaaaagcatacttgcagcagtatcccaaaagggatcctgactctgcgcccctttaggggttgttgctttaaacaaattggtcactaacttttgtacgtcattatcatttttcagataggcaaatgggttatagcaaaacgatttatccatattgattaaatctaatactcgtacttcatatcccatctgtttaagcatatttccagtatctctggttagctctccttttggatctaatacaacaaaactggtatttccctgtaaaagattaggttttgcataaaatcttgtcttacctgcaccacttccaccacatatcaaagtgagtaaattacgtcgatgttttcgactgttatagctgatacgaacattttgtgtcagtatcttatctttaatgggtttcctacttgaatattttttattcacttttgtaatggaaccccatttggcacttccatgttcttcgccacgtcgatagttcttttttgtagaataataaattccaatacctacaccatagatacatagaaaaaggaagatagtttttaagctatcttccgtccatgtaatggataaagggttgtttaaggcattggtcatatcagcaagatgtgaaaatatacctcctgtaaataaatagggggctaacaataaagctatccaaattactggaactgtaccagcaagaaatagtgctaaatacgtttgattctgctcatcgctcactgcgatcacatcctttatatctttctttggcttcaatgacttttagtaaggtattatcaatgatttcagtatcctgattatttttaatcatttctgttcttctgtcatttaatgtgtttaaaattataccataatcatatttatccaacctaagtgtataaatttctttcataacttatccctttatctttcatatgatttttctttagtagatcgattttgaactaatgttggttccatgcgattagagatatcatttgcaatatttttaatttttgctaattcttttttgatatcctgtggctcattggtttcactttgaggactaacttcaaagataaaatcatcagtatttacaccatattgtttacacaacatataagacgaagcataggcagttaagtgattttcattgcggtcataatgaggattatctttcgccatcattgcatgagcaatttccattgttgttagctgaaaaacttttgtagcatcatcaagaccatttcttaaataaatcttatctgaatttttatcatacataacagcataaccttgtggcatttgttctggagtgattgatttaaagcctacaggggaactgtttgctaatgccataattaaactgttgatgtcatttaatggtgtttcacgatgacgtgagtttttagattgagaaatatcataaacctttttggcattgatataagtgcctactgatccatcttcacgacgatattcatcacccggctctaaaatcaataccttattatccaattcgtttctgcggatataattcttttgatttttccagtaacttagatcacctaactgtgtagcctgtggcatttgttttaataccagtaaagcattattcactgaataactaggaaatttactttgcatatctaaataggactgaaatactttaggatcagcaccaacacttaatgccatctcattagccatagagaaacactgttctctgtttgccttactttcagcaataaaggcatcaattgatttctgtttgctttcttcagtactttgaatacctgtaaacatttcatttaaattactcatagattattacctctcttttcttttggattttttagttttaggttgtttatggtaaacagctttagaagaatttgattttgatttttcttcttttatctgcttagtcgcttttttatcctgttctgcttttatttcatttaattgtgatttgacacttggttttggcagtttaataggttcccccacgactttcttcaatgaaggctcggactgacgggattttgtcgtcttcgccagattggggtttgaaacatttgtttccttttgcagtggttttgcaaatacttcttctagcactttttcattctctgatttggttggtttatcacgatcaggcacttctttattctttttcgcctcacgtgttctttcaatatctgatttgatttgagcttcagattgactaacatcagcaaatttaaagcgttctactatacgattaattctgctggcatcttcttgtttaacaatgatatcaatcataccatcattactcatcttagaatcacgaataccactgtataaaataccgtatttctttgcctcaattttaaattgttcataatcacttgctttaacagtaaaaatagttaaaggtcgtcctgttttgattagattttctaatcgagtacgacctttgctttttttgttgtcttttaaaatcgcatacagcatggtggctacttctttagctgctactcctgtaatacgcaatgcaacttcagctccattcaagcccatcttaatgacttgatcagcggcttctcctcctgtgttcaattttcgtctcctcctttctttcatcttctttaataacttttagtttctcttttataacctctgaacgttttgcaatatgatcacataagaccacctcctttcgtaattttccaatctcagcagttaactttgatatttcacttttcagaaatgatttatcatctaaatctttgcttctcagtttagagcgtaggtgtttacgtttactgataagtgcattcatttgttctagctgttgattttggtatgaaaaaagctgttgtgaggtatcaatcttgttcatacacaacagcttagtttctttattaatattttctaattttgcgagatcttcttttaacaaaaagtgaagtctagcaggggatactggtttgtttttaggcagtattcctaacttaaaacagtactgaaaatataaagcacgaatacctttatatttacgatgtttatttaatggaccatgtaatttcatgacaatgattttactaggttctttcttttcaggtggaaaacctcgtgtattggctataatctttttacaaatggcattataggtatactcatcacctagattcctcgctaacttcataccacgttctttgccttgaggtctaacggtaatatccttaccttgtttgattgagtagcctttttgtcttagcagataaaagaactgtttatcagttaatgcttttgagatagcttcatcgacatcggctttaataattccacgccacgtaggtctgccatcctgttccgctttccactcaccataatgttttgctttaccacgtttagggttttcaatgacagataatccaaactctttacaaatacgatccgaagtttttcgcattagcatataagttttggtacagtcattgtagcgatagccatctttaaaggacactgaatttaaaacaaaatgattgtggatatgattttctttatctaagtgggttgcaacgatcacttgaaatcgttcaccccataattcattagcaagtctaactccaatttcatgtgctatctctggtgttgcttcgttaggagcaaaagactggtaaccatgaaaagcaacaataccatcttctttaccataacgttttttaactgccatcatttccgttcttgcagtattggtggaacagttaatgccactaacaaaatgctctttaagttcttcagatacagtagcatcttcacgcattgcataaccaatcacatctcccaatgcttcagtttcattatcattcatatcctgtttttcgtaatatttgggatttgttgttttctcaggattttcagcatagatgactaatttacctagccagcctttaacatcccatatcgcagtcgttgccattatttatccataggttgtggcaagataactgcttcagttatttttgttaccgcattttcaaattctttaactgcatgatcatactgttcaacatcaatgacatttaactgatgagcttttcttgctagctgatttagattatttccaatagcgtgtaattctttcatcatcatatagtaatcagctggtggactatctctaggaacaacaccatttatcaaatgacgaatatatgcttcctgtgatagaccacttctttgcactaatctagcaagatgttttttttctttttcatttaatcttgtgataattgatatatttcgttttctcatttttttgctcctttttattgtaaaataaaaacaacagcttattttcagtctgttgcttattgtattaattattttctaatttaaatacatatccattactatttaaaatattaaatgtatcaattaatctaaattgttgattcctatcaattaataattctttctcatttctaaataatacaaaccaacttatatcactaatatatgcaactggagaacccttaggaatcaatattattgcatatcccttgctgttagatactttaaaaaatctattcaatagtatacgatgatatacatgagtacctttaaaatcagcacatttaaaaatactatttttatttaaagttttataatagttattttcctttttatcaatacatctaactactataatattttcttgtaatattggacattttcttattgcctttgaaataatactagcttcgaaacaatctttatcatcccttaacatagcatttatttttcttgaatttctaatatacttccttattgcttttttctcctctttattcaaattctttttccaatttgaaaattgcttttttaaattattaacatgtactactttaaaatgcacactttcatcaattctactatctattctataatgtatatttcctcaccttcttactctatctaaattttaagggtattagggaaattccctaaaaaggataatgggctatccatatccagtgcttgctggtatagtgcataatataaagtaagagtgtgtattttggtttccgttattttacaactacctcaaaagaattttggtgaatatctacgggataataaattaaatgttatgatttcgccatttgattaaccatttgtttaataattttccacactcacataaatattcaatataattaggatcactacatttactgtgtttatttttatatacactttcttcataattataattgctgactttttctaaaaatcttctctcatttgatttgacatatgtgttaaattgttttcgttcttctttatttttaaaacacaaaataacattatatggattagaaagcatatattcagattggcatatatctgttgactctttaaatgaattttcttctatttgtttaattgtatcatatgaattgcataaccaattatcaatcatatattctatagaatccttttcaacataacaataacatatatactcgttattcgtattctgaaatagtatttgatttttccacattgtacgcttaaacctgaaactatctgcaaaaatcgctaatgtggagtataaaactgttgataaatattttaaattaatcgtataaatatatgaattgtgtatttttcctggtaattcattcatccaataaatttcgtgttcaattttatcaatatttccttgatcaaatctttcttcacataatttatattgaatagtaaattcaggaaatagtttatgataatattctccagaaaagtcattacttgaatgtatcccatcagttccaactggataccatgattttgtatcttttaacaaatatactgccttttccaatggtgatagatctaaaccaagtctttttttccacaagtattcaattttatcaaaatctgcagaagatgttttaggagtatttgtatcaacaacacgtgtgtatatatggtacttaaagatatcattataattatctattaaataataggggacatttttactgttttttatgattattacatctatttctttttctaattcaatcgtttgcacataaacgttagggcgacagccatgtgcaaactttttagtatgcaaaaaatcaattacattttgttggttcatacgattttcgtttttttcaataccgcatatttctgcagaatcatttacaccaattataatataagcatcctgatttgcaagattatttgccatacaaataatatcatgcaataaatctcctttgtttttataccattcttgtttgaaatcccaataatctccttctgtcttaagttcaattaaatttctaattttatcttttaaattttccataatttccacctaattattcaataaatattttgtttttccatgttcttatttatatttatataatacaataaatttatttttaaattatcataaaatatttctttaatctatatctgaatctaatttatcattaataaatcgatactcttttttattatagactccttgtttatttcggtcctttcctttacaataaggacatatataaatcactctaccatctggtaacgttctatagtgtccacgaactccccaaactgtagctgtgtactcgtggttagcattacttgcaccatgttttatgatattaccatcttcatctatttgaattattcttttgactaatacaatatgattattttttttaaattcttcataattttctgatatctcatctctttgctttataattctaatttcttcaggacaattattcatttcatattgaattccagcccaaaaattacctaaccagtatgataacttagcaatatcatcataattaaaataattcaatgcttctttatttatggaaataggtaaaataaatgcgccttcatcttgcccaatttcaactattgctgtttccatttcgattccaatgtctttatccacaagacaaactgttaatgcacaatatacacttttattaatatatgtgaaagtggcatatattccatatgcagacgcctctgtacgtactcgattgacattacttaatagcacacctatttgtgtatctgcatttaaatcaccaaatatgtttaattcaaattcttttaatgcaataggttgcgtaaaaaaatcatatgatctacctataaaagatattttatcagcaacaatatcagtaagatcaaaataatcaataggttttgtaaaattaattttcttttcatttattaccactcttgaaaaatttatatcagccattacactttttccccaataccattgaagttcttgaagtgtagaaggcaatcgatttgatctaaaattcatttacttactcctttctatacattgtcatttatctatgataatattatctcatttaataatatcgcatacaagaaatttagaaattacaaaataatttgtaacaatcagtatttatcttgtgtaatttttagtattcgcttttagtcttgatttcgttttagcaatacccagcctcatacatagattgtcattagtgtctttgtaatttttaggaggatcatcataacaactgtattcaggcatatttgatttcatatttttaataattaacttggtagctcgtcttccaactttatctaaatccaaatgaaaaactatattcttgacttttgtatgttcttttagaaactgctctaaagcaagtggaatcttaattttcgtagtatcatttctaggcgcatatatacctgttagagaaagaatatgctcgtgattaaactctttattatccagctcaaataaagttgcttgtgataatacatctattggtgcttcattaacatgaacagtgtcacaatcaggattatttgattctatacaaaacgaataacgtttatcactgccagtcgcatcacctatgaaatcttgattaatcccacgtaatgctatatgtcgaggtttattagtctttttgtcccagcctataaaagcaacattttgatataccttatttgttgatggacttgtatattcattttcatataatagatagtggtcaatacaatgtttaataacattaaatgatattcctcgacttaataaataattaatagcattttgatctgtttttgctctttgaggaatctgtaattttttatctctttctttttcagagtagggaatatattcaggttcttttacttttatgttttctgcaataattgtagctgcatctaagaatgtgtaattatctactttaattaaaaaatctagtgctgatttaccaccaatacccattgactgccaattccacaatccattggaaatatgcaaactgtcatgatcacgtatacaataggtattatgcgaaatcttttttaatctatctggctgataatttaacagatatgtcaataaatcaacctgttttactttctttaatatctctggttttatatatgccattttacataactccttttaaatatttttatgcaaaaaggagaatcattattgactctccttaaatagatttgctcttgcaagcatgagtatcatatctttaattcctctaaaataggactctttcattaataccttattgatagaactattaatttcatgatattcttttatgtttttttaatcttcttctctaattgttacaggttgtaataactctaatttgttaatgactggaaagtcatccagtaataacccctttacatatagaatttgctgatattcatcatgcaactgagcatcttgagttatttcataacacaactcatcaaagttatcatttagtagagtaagaatactccaatatcttttatcttccaacattttcccacctccatataataaattactggaaaaacaggaaaattacaaatgtgcgatttattacaaaagattaatgagtattaaccattgcagacattctgctaagcctactttatacatttcacatttttcataattattaatcatgtgctgattttgcatataggttgctaatgcttgtatttcctctttagagtatatatctttcgttgctacagtagattcaataatatcaactaaatggggatacttcagttttacttcttcattttccttattcaagagtttgtaattatcacaagcagatagattatctaacaatttggaatctagcctgttaaataaatctccaaaagatgagatattttcttctaaaaacggatcaatatattttgtcataaaatacctaccatacttaataaagttatacaatcagcaatacctgttttatataattctaaacgttcataatcatcaatctgtctttgatattctatatactcctttaatttttgcatttcttcttttgaatacaattcctgcgttaaatctgttagttcaaagaatgcataaataaacttattctcctcagctagataatcagctttattctttaatgaaatatacttttcagatttgtgttctaattcagtacagcttttgtcatctaatcggtcaaggaatctgctcataagcgtagcgtgatcttcatctaataaatctataaatttcatggctatccacctcctagatttattataggaaatgaatacccatacgacaaatgtgcgatttttaattaacgtacataatctttagatttaacattcatttctatatcatcattacttcctatttcattgttatcaatgatatttggatctttttcttctatttttaattccattgtcaacttagcaaattgttttgctttttcctgtagttcttcttcacgatcaaaaggtttttctgcttcgatttttgctgaagctaattggctttttacatctgcaagggcattttcattttcttgtaactgtttttctaaaccatcaagtgcattattgattctaacaatattaccaaacttatcactacctaaatcaatctgatagcgaccatatccttttaactgaagtttatattctgcataaaatgaatcaaagaatacagatatttcaaatgaacgataatgaccaatggaaataggatctggagatgtaattgcttgacactgttcaatcagtttatggcctgcttctgccttatcctgaataaaaacattattcaatgtcataccgacaaaatcatcattagatggtaatggattttgatttcgctgttcaatatctaatttaagatgttcaataatttcttccagctgattgatttgctgaggatatttttttatgatagcatcctgatactcatacttttggttgagaaaactggcttttaatacatttagtttattgatatcctgttcaagattacaacgttccataatttttggatcaccagaagcaatagctttaatttctgcataatttagtactgcttcatcgatttcttccatcgttctctgcggtgttttagaggtaaatatctgtgatataaaagtctgttttttctcaatcgtctgatagagataggagtcaaatgttccctcagttacatacgtataaataaaggcttcactgttgagattaccttgccttgcaattcttccatgacgttgttctaaatcacgaggtcgccaaggacaatctaggtcatgcaatgcaaccaaacggtcttgaatgtttgttccagcacccattttagaagttgatccattaatcacacgtactttcccttgtcttactttactaaataaatcctgcttttgtttctcgtttttagctatatgaatatgttggacttcttcttcaggaattcccttagcaatcagttttgctttcatatcatcatagacattaaattcatttttaccgttaggagtagataaatcacagaacataatctgagttagattttcatctttgtattcttgccagattcgataaatattattcacacaaagatttactttactgttaggattatctggcagtagtggattaataattctttggtctaatgctaatttacgtccatcattagtaatttttagcatattgtcaatatgtggatctacttcacgatttcttatagcttctgcacgttctccaagtgcttttatcatttctttttgttcattagaagcaggggcagaaatgatttcttggtgcattttaggagtaggtaattccagcatatccgcagtttgaatatccgctacttctttaaacatcgtcattagttctggtaaattgtaaaatcttgaaaatcttgtttttaatctgaatccattgccttctggtgttaattccatagtagttgttgtttctccaaaagtggaagcccaagcatcaaaggactctaatccatgttcctgtaacaagttgtattgcagatacctttgcatggtataaagttctgccatactgttggctactggtgtaccagttgcaaatactacaccacgataattcgttaattcatcaaggtatcgtgttttcataaacaaatcagatgctctttgtgagttggtttgggatattcctgatacattacgcatttttgaaaacaaaaataagtttttgaataaatctgcttcatcgacaaacatcatgtcaattcctaactgttcaaaacataagatatcatctttcttggaattgtcattaagtttttgcattttttccttaagacgctttttcatgctttctaactgcttgacagtaaaacgttcaccgttgttattcttaacggtttcaatactgttgcttatttcttcaatctgatcttccatcattttgatttgtcgctctactgaaataggcatttttataaactgtgaatgagtaactataacaccatcccattcaccagttgaaattcttgaaaagaactgatgacgattatttttagataatgtatctgttgttgcaacgagaatattagcacttggatacagacgataaaaatcactggcaaaatcattaatgatattattaggaacaacataaataggtttgttgcagagtcctaatcgttttgcctccattccagccccaatcatttcaaaagtctttcctgcgcccactgaatgggcgagcagtgtatttccaccataaaggattctagcaatagcatcaatctgatgcttccttaatttgatatcagtattcatgcctgaaaaagataaatgactgccatcatacgttcgattacgaatggaattgaatttttcattataaatcttagtcaatctttcacgacgatcaggatcagaccatacccactcaataaatctggatttgataatatcctgtttatcttgagcaattgctgtttcttttttattcagtacacgaacttctttaccttcatcatctaacttcgtatcaaaaattttgacatctcttaaattcaaggtattttcgataattttataagcattgatacgatgcgttccaaaagttttggtggctctaacaccactgtctaaacttttacgagttacattccattcttcagtagctgctaaatagataacgtgaatgtctttctgtttccatgatggggtttccagtagatgaaagataaactgtctataaacatctgtagggatccatgttgtacctaatcgtaaactgatatcactggctttgataggctcaggctgaactttttctagggcttcaacatttgactgataaagctctggattttgatcagccatctgttttgcaatcactaatttcgctcgtacattacctgatagatattcatcagcagtttcatagactggtaaaccattctcatttaatttctctggattaggaaagataatcccatctagtttttcaattagttcctctttgctgaagtttgatatcttagtcatgaagtcaaaatcaatatgagctttttcagcaatacataccgttaaggcttcactggcagtatctacggatttgataacttttcttgccttgattgtctgcttataaaagatatcggctttctttttgaaagatctatcatcatttaatatttccagtgaacaaagaaggctataagaactatcttcctgaaatgccagtttatttccacgactgttaatgattccataatttttactgaaatcatcatagagtgaattaagtttttgctgttcttcgttaatgagatgaataggtgcttcgttagtttgcaaatcaattaattctctcatgcagtcacgtattcctatcattcctctaactctgttttcagcagttagcgacatatctgaaggatacattctactgttttcacgataataaatagtaccgtctacaatacagtagctgaagttgcgaacagttggatcggctggaattgactgatcttcttcatcagtgaacagtattggttcagtatttattttggcttctatagaatccattgcaatagcaagggattgtgctaaatcaacttcttcaaatgctttacagtttgttgttttaccatactgtgaagtttcttcgaccattgttcctaatatcatctctggatgattgacaaaataagaattcattgttaaaccatcttcattggtatcaagatagatccactcaggctcgtataaaagtggtctttctcttttctgtaggataaggatatcgctggtaattcttgttcctgcattgttcatgaaggtattatcaggtaaacgaacagcaccaagcagttcagctctttgggcaatatattttctaacatcattgttttgtttatccattgtaaacttagaagtcaataggataacaatacctccaactttaactttatccagtgctttagcaaagaagtagtcgtgtatcataaatttatttttgttgtatttaggatcatggattggaatctgcccaaaaggaacatttcctactactgcatcaaataaattatcgggaatatccgtttcttcaaatccctgaatagctattgttgcattttgatacagttgttgtgcaattttcccagatatttcatctagttcaacaccataaaaatgacaatccatatcgttaggtttcattccaaagaaatgaccaataccgcaggatggttccaaaatattacctgtttttaatcccatatccgataatttttgatagatggattgaatgactactggaggtgtataaaaggcagttagagtggattctctagctgccttatactgtttgtcattgaggagttccttcaattccagatattcatttttccaattggtttttgttttatcaaaaacatcagctaacgatccccagccaacataatgtgataggatttcctgttcatcaggagtagctaaacgatgttccagttccaatttttttaataattgaattgcctgaacgttcgccctgtatttttctttaggacctcctgcacctaaatccatatccttaatagcaaagtcatgacgctcattattggatacttccggatacagtttatgagaagcaatatctgatgttggctgatataccatattagggatatttacagtttcaataatttcaacatcttcaaacaattctttttgaggtggtaaatctttaatttcattctcatgctcagcaacaaggatagatattcttctttggggatcactgtcaaactgttcacgaaaatattttaaatcatcatcactgccatcaaaactagaaattaagccatcagttccgtattcaacctcggtagggtaattatttaaaaatattctcattttttcaagatgatattgtttatctataatgttatgaagccatttgtgagcatactcatttaattctttttcagtatctgtatcaatgaccatattgccattcattgctacagactggtaaaatgctggcacatccttttcaaatgttcttgcactgagtaactgccgatcgctgtcgattacaaattccatattggtatcagttaacaggttatcatcagtttctaaataatgtgtcatagaaatacgatcatcgataatttcaatatctaatggcatatcatgttcaccagcagtaaatcgcataaattcactatcaccagtaataatcagtggagcaatctgctttattagtctgtagtttttttgagcaacttcactgtctttaacaagttgaacattttctttacctgtttctagtacaggaatcaacgaagatatcttatctattggatcatcatgataattttctaaatatgatgaaagagcagtatcacttccatcaaacgaagtaatattaccatcggctccataactgataactgtttctttaccctcaccattaaacaaaacagaggaaagaatgtgtttatcagtagaaatacttttaataaactcattagcaaattcattcatctgctgttcttcattgtagtcaacttctccgttaaataatgatatcttagtcgtttctcctccagctgtcatttcacgaatatttaatgtttctaaagatgtatctaactgaaatagatacttttcattaccattatgatcaattgtaacagtatcatcatttagagttattgaaattacactcagttcattgggtgagcgaaaaatcatttctatcgcctgattgttgattataagcggtgcaattcttttgaaaagaacataattttgatagcctaaggtgtttcgttccttttcatctgcaacaattattccttgttcctgttcatcattcactctcatcagtggtctgctttgatcgtaaaggtatccatttcgataatcatgtctaagatcattttcaaaatcttctttacttatttctaaatcattatcatcatatagattaataataatgacatcttcatcaatcagttcgattgttccataaacaggtatctggttatgaataataaaaacaaaatcaccagtattgtaacgtggttcctcctgagaaatataagcacgataggaataacgaatttcattatcattgctgagatttgaacctttctgcaatgccaagtaaatgctaagttcttctcgaagcatttttgcagttacaaatgtatcattgttattttcttccataataatagcattcataaatttgatataaccttctaatccagcaatatcatttaatgtatccttttggttttgaactgcatcctgaaaatcttcatactgatcagcaaagtcataaggatcatacagttgcgcaaactctgctagtgatcttgctaatgaatcaaataaattatcagctggctcataaggtgtattaatcaatggtgttttcttctcgttaaagagggtatattttccctgataataatcctgcatacgattaaaatatttcattctgctttcataatctttatcaaattcagctgtatttgataaagcaatctgcatcatatcaaggacgttagcagtattggatggatcttttaataaagctttaatctcacgatttttatcttcatattccaattgtgagctatatggtcgagggttgttgagtggtaatcgacaaaagaatgagtaaatatttctagcaagttcctcgatttcataatctttcattcctgctttttgttcatcatttaaatatttatctcgtgaaatgagataggataatctctgttcaacatccttccactttagcataatctcagcatagggtttattgtaactacctgttttaatttttaatcctttggggcttgcatcataattattcgctccactccatccccatatatctttaataaatttaattctgtcttttttgtctttgttgtttagaaaaaaagaaagtgtatcatatttttgatgcacacgatgttgactggcaataattgaatcaatcgtatcttgagttacaaaataggtgtgttgaggttccttataatcaatagcttcaaacttgatatgaggcattgaaagttgctgaataactggaaggactttatcaggtgcataacttctccaatgatgacgcatatagtctggattgctttgataatcattgttgaatgctattaaagtacttatagttctctcataaaattctttatctcttaataattttgccatctcagctgttccgttaggaaaacctttatgataatgttgacgaagttccatcatatgatctgtttcatcaaagtccatgtcctgacacatataccataaatgtcctgaggcttgctgatattcataattagcacattgatcaagttcatcctgagagatatatcgtccttgatctaatagattgcgaataccttttgccacgtcttgccagctcaatatctgcttatcaaatgcattaacgattccatcaccccaagtgatttgaataccatcattattccatttatacgaaacactacgattgtcaataataaaaccattactgccctcattgtatagatttttaataaattcagcattttcttcaacaggatgatctaaagagaaatagttagctatttctattttagattcttttttctcagttccttcacttaaaactgcatcaacaatgttttgtggcattgcaaatggctttatttccatgtttttttgagatggttgtactggttccatatcaaataaattcaactgctgtttttgagtagttggtaatggttttaaaggaatagaaagatagacatttctttcaatcatgtcctcaataaatgaggtcacatcctgccacgatatataatcttgaaaatccggattggaataactgcctttccagacttttagcatatctttatcttgatcacgataatagcctaaacgctgattatgataaatttcttcaataatcatgactttaaaactttctttaacatagttagttcgtttatcctcgtcatcataaaattcaaagattgcttgaatatctttgtttttatgactacgaaagcgatcatacttaatcaaatgttcatattcatcaagcgtaaaaaaagcaggtattttataattacctacttcttcatgaatatcattttgttttaactgtaaatcagttctcttgtaatcatttcgtgaatcatttcctcgatgttgttcatcctttgaatccactccatctgatttgattctttcaatgcttccgttacttccatctgtttcatcaattgctccatcagtaattttttcctctgatttgctgtttcctctatctccatcaggtgctgattgagagtctgtgatgtcaataggttggtgaacagtattggacggttctgttgaagataattcctcctcatcattccgtatttgcctaactgaattttgttctcgcttttcaatgttaagttggggatctgatattctcccatttgaatgtaatctagtttcattatcttcttgactcctttcactattgttatctttttcgattttattgtaacttctctttttgttctctgcaattgtgcgattttcatctctaattaaactaagaacagtttttcttatttcaccaataatcacttgtaaaatatctttcgcaggtacacctaaggcgttcaatgtttctcgtgtattaaactgagcaatttgacgtaaagtatcactacttatataatcatcagcattaatatcgcaccgtgataaagccatataagcaacactagctgtcagtaaacttcgataaatcatttccgtattctgttcatctaaatcttctaaaaacgaatccgtcttacagtattgaagttctttcaaataatcactgatattatcttcaaccacactattggacgctgatactattgcctgtgccaaatcataatcattatcaagaggaccgaagttatcttttagtgtattaatgacttcttctttgtattcttctttcagttcccaaattggaactgggcgataaaatctcgtctgacgtgtatccgatatatcaaaataatatttcaatcttgcatgattataatagtttgaatcaaatactgcaatcccttttgatttaggtttgatccacaatccataacgcttgttccattcttcaatttctaatactgcggtagcatcaggacgttgggcatagatcataaccatatcagcaaaagtcaagcgataattgcgacatgctgatttcaaaaaggctgaccacctcatttcatcctgtgagatttcctttaatgtctgctgatacaatttggttgcatcttcataacgtattgccatttattacacctcctttgattttaataaattgctgtattcaaatagtgataattttggtttataaagtcgcttaatatcagtgtcatttatttctaaatacaggttttcaacaaggttgatttttttattagtaataagtgtagcaactcgattcgtcgcacaattattggtaatcatttcaaaactcccatagtgatcaacatagtgaatactgtaaacgtaaaaaggttttttaatctgattaatatggataggtaattcagtaattaaacataaattatttttatacagaataggctcaaataaaatatcatagatgttatgagcataatgatatctatctttcatgttctttattttccttagatttcattttgtgtaaagctaaatgtctatccagcagaggataaatgtctttgatatcatgacctactgttgatttgattgtctgagcagaaataccattgtttttacaaaagagaatatatttattaagtccttctttgcattcgatttcgtttaatccccagtcattgatagttgtccatataccatagtgaattgtcatatccataaaatcaatttgatagccatcatttaaaatttcaaatatatcctcatctatattccactgccattcaaataagggatacacatttatactgtcatcaaggtttgctttaactgtttcatccgttttataaatcattccatcttctggatcatttttattaatggcagttatctgaactttataatgatctatatctttttttataaaaatatatgctggttcaaattctttatatttattactttgatgaagtgcatatagcattttgccataaagatctaaatctttcttatccatagtttcctccttgtgtcttttgattaaaaacaataaagaagcagattgttgatctacttctctaacaaataatttaatttttactttttagaattttattgacttctttatctccaccaaaagtaaaatagtattgctcattgaattgcttcattttgtcataccagtactttttaatacgattttgaaaatcctcaaatgcctctaaataagaatgataaatcttctcatttgtgtatgttgaataacttttattggagtcgtaaactgcaaatgtatctttcagatcatcatgtccaaataaaaatgcacaatcttcaatagagaagcgtttaacaatcacatgaccatttaccatttcaaagaactcctgatcagcaatatcttcaaattcttcaccacaaaacgattccagcaaatcagatgtgatatcgtgctgtttgcagtaacgcagataatcatttaaacggttttcataatcttcaagctcattatatacatcaaaataattagcccaaagagtacagtgaaatggcaatgaaacataaatgatttcataatcaagatcaagtaatgatgccaaccataagcatggattggattcattgattttttgagcatcaatttcagtaccaatatataatgaactttcctcattgttgtctaataagtttgaaatataggaagcaattgtaaaatggctatcactctttttatacagtactatttctgctgtgtggtttttcaattcactattcatcataaattcttttaatatttctaatatttcttttgttttcttcttcattttttctctttcctttcattgtaataccttctatatgttgaaactatcctcctttctttattaggtatgtaaaaaggacgattactcgtccttgtcatgcttgtgataagcgattctatattgctgatgttttttgctggcttttatcgctaaataaatttttaatcccagcaatagcaaaaagaacactatcaataataaaataatagccaaactactcatctgaatcattacctttgttcttctttaaatgaatatacaatgcaaccgttcctaaagatagaacagctaatattgtatataattcaatatggcttgaatcgccagtttcaacaactttaggggctaattcatctttcatcacaaccttttgcacttcaccagtatctaatactgtaaattcaatatcattggcaattagatagccttgtggtgctaattcttcatgaaggacatacgttttaccaacagttagtcctgtaatacgatgtggctctctagcagaagtccagctatcaataacttctcctgtttctttatccgtaagtgttaacttagctccttcaatttcttcaccagttgtagcatctactttagaaatatctatttttataatttcatctttcataattacttgtgttattttcccatcatcttctacagtaaatgtaatatcactggcagtggcataacctagtggggctaaatcttcgtgaagtcgatattcttcattgatttttaaacctctaataatatgaggctcatcggttgatacccattcttcaatgagattattatctttatcatatagtgataaatgcgcacctgctaattcttttgaatcagtagcatctattttgcttatttctactgtactttttgtattggtaacatttaatgtttttgtatagattactttatcactgtggtcatatgataaatcaatttcatattctttttgatcagtagcatagccatccaatgacttgacttccttaatcatatattttcccaatggtagatttgagatatgaatttctccaagttcgtttgtcatatataaaccgttttctgaaatatctactgaaatagtttgaccagctttgtagatcaatgtattacgtccatctaatgagtagatatcttcttttgcagttagctgataaacaacaccactcaataattcttcgctgtctttatctgttttaactaaatgaatttctccagttggagcaatgtttgtaacatctacattaattacatattcctttgtagtcaaatcagtttgctcaaatacaatatcatgaatttcttcacttaatatatatccttcatttgttagaacttcttttagttcataatgacccataaacaaattattaatgacgatttgtccattcgcattggtagtgccttttgcaacaatactgtctttttcaaaaagaatggaaccatcaatagcattgatgatatcttctttagcagttaattcatactcaacgttttctaaaggatctgctgttactttatctgttttctttaaaatgatttttccttttggctgtgcattttgaatcttaactgttagaattggatctttatcttcatcgacatcataatcatattgattagtgatcgtgaattgaacaggcgcttccaaagctaagaatccattaggtgtttttatttcttcaatcgtatacttaccagcatctaatgcaagaggtaaagtaacttctcctttgtttccaaataaaacagtaatttgattttctgagttggtagtaaatgtatcatatttttttccgccaactttttgcgtaacataatttccattactgtctttaattttgaatactgcactgttaagagtaacagttttaccattatctttatcaactttaattaacttcacttgtgaagtaaatggtcgattgttaacatttactcgcttgatttgttcaatatcttcatattcagtgtaatcatcacttacacttattaagaaatctggagcagtaatataatcctttggagtaacggtttctttaacaagatattgaccatatggcaaatagggagtattagcaataccgtttttatctgttgtgatttgtgcatacgttgttgcactgtcccacccgacatgatcaacttcactttttaatttaaaagtaaattcagcaccttgcagacctttaacgataccggaaataccgtttttttcaccgcttttaaacacttgaatcttttgcatattaacacgattgcttgtatcttttttctcaattactttagataccgtttgatcctgatattttaattcaatatcaatcactgttttgtttaatactaaagaatcattagaagctgtttctttgatatagtaattacctaacggtaaatcatcccatgtaatttttccatcagtatcggttttcttagtagagatacactcatcttttttatagaatgttttagtccctgccttattagtgatagtttctttagcgtataaagcatacgtgttgtctttaataattgcatcacctaataagccatttgttttatcggtatcaatagattttgttaattcaatctttccagttggctcgatattgcttggatcaataggagtcgtttgattagccttgatagtaaaaccaaattcctgaacattgattaaatacccatcgccagcctgcgtttctactgctttataatcacctaatggtaatctttcgatttttaaaataccgttttcatcagttggtaatgtttggtcgtagccattaggaccagtaatacgataatacgtattaggaacggttgctgatttatcttcgttatattttgttagttctaaagtaccaaatttgttgactttcactctcaaaaatacagatagtgggtcagataccttaaatacacctaaactttgatcttttccattgtaataggcaagactagtccctaactgatcactaggaatatttctttgcagaacaattgtagctgtatcatcagcgtttggatttccattaacaattaactgattccccttgatcgaaacatctaatccgcctgaattgatgattttcatgttatccaaggcattgtttgtatccgtcaatgtaatagatttatcagcatcaacttcaaatgtttgtgtagcaaatgatggtgttcttttgtaattttctacatctgccagtatttcgttccacaaacgaacagtggtagcgtaatctggattggtgggagtttccacataacacatatctgtagaatcataatgaattgttttccagattaaaccttgtgtaatagcgtaccagtctttacccgttctgcctgctacttttgttccaaaataactgattagtgaaagctgtattgcagtttctcttgaaataccaacatcttcaaaattaacagtatgcattgttactccagatttgaattttccgtaggcatcaatacaaaatgcctgctgtccaccgataaataactcagcttcatgactatctctacgtcctgtactaggatcagccaaccaccagtctttatgtgtaatgccagatgtgactgctgactcggctttaacatttaataaccctaaattactgatggttatcataattgtcatgaaagcaatcataaatgtttttgttttttgctttagttttatttttaattctttgctcattattttatcctccttaatggcaacaaaaaagatgaactgttttataagtccatctgtgaaagtaaaatattcaattgttattcaaaatacgtgtagtaataatcaaatgaccatttgtcataagttgagtataaaaaatatcctgaaatgaagtaggtatcagtaaacgttccattatttgcatcagcaactgctctagcttcactctcagtgttgtacaactttccgcagtttcctactttgtagttttttggctgttctggctctggctgtttttcaggtacaacattttcaactggtggtgtaggtgtagtttcacttggttgagaatttgtagattctgatgtagagctagaagttgaatttgactgagttgatgactggcttgttgtttgattgttctttgaagaagtgccttgatttttagaagtttggtctgttgactttttagcattatcattacttgcatttgaagtagaacttttactatcttcatttgtttttgaatcagctttcttatcttcagcattgtcatcactttgtttttcttctgtagatttatcatcaactttttgttcctgttttgtatcattcgttattacttcatcttttttatctgtactactgcaacctgcaaacattagggaaagtaataacaacattattagtttcttgcttttcatatctatcaactctctttctaaataaagtttatcatgttatatatacttaaacaaatatataaataactaaactgatatttctttttgagttggtaatatgttttgagctggtaacagggggagagtgtgagagggggaatagcaaaatggctatccataacctacaatatatcgacacttatcccttgttagtaaggggttatctagactctctgttggaacgctttttctgttgaatacgctgatagagttccaatgctttaacaatcgtatcttcaatttcttgttcagacgtcttatttgtaaagaaatttttaatacgatttttaggtattttaattttttcaacctgattaggcttttgttctgccatgatgttatcaataacatcagttgttaataaaccctctttatctaatttatgcattttgagtgtttgagcgtgtgagggagtgcagtcgtttagttgcataacacctaaaagatattcctgatgtgatttatctaaaaacgatatttctactgctggtcttaatgcaattaaatcattatcaaccatttcaagaatatctggtatcaattcagtcaatcgaatataacgtctaacagtttctctgctttcgttatattccttacctaattctgctacagataacttctccaccagtggtgtagaagttaaatcagtacgtaacccttgtcttttcattgcatctaatttcattttataggcaaaggctttttctgatggtagtaggttttcacgctgacgcagattgtaggctaagactacagcgcctttccatgtctccataataggtttccatagcctcgccccgaaaccgcacgtacacctctcgatgtatacggcttcccatttatcatagtctttcagttatttcgtaattttggcataacagttcggacaaactgcaagtgtcttacgacgcttagccaacataataatattccattcattgtctgctttgattgattttaaagacttaacatggtgcatacatatatcatctgtgttttcaccacaaagttcacatacacctagcttaatccttgtcctcagataatttggattatcgtgtttgacgtattgtggtaataagtcaggctcgaaactgcatgtataacgtttctttttaaatccgtcatgataaaactcgcagtatttcaatcccgtctttgtattgtatggaaccataaatatcccgttcttacggtactttctctgtatcttataaacactctttcgatatttcagaccgaaggttttgtacatgctatattccaagataaatgcaaagtttttgatgactgttgcattctcagcgatggaataataattgtacattcctctgatttctgcgtttacttgcgatactatttccacgtctgtcatatgaaccatatttcctctgtggtgtgagtcccatatttccttgccattttcgttgtacctaatccttagagcaccatactccatcaacttaccttgccatttatctcttggggcgtacaatttaattctgcccgtatgagttttccttagttgatgctttgagtcatacataagcgctgagttctttgcggtggtgatatcatatccaagaaatcttgctttatcttgactatgtgttatcttggtctttttttcggacatctcaagatgcagagtatcctcgagaaatactctgaatttttccttgatttcagatgcatcctcaaatgaacctatgactccaattagaaagtcatccgcatatctacagtagaccaaacttttgtattcctcgttgtttgctctcttgcttggtaaactatgcatgtagttaatggcgtccttttgcagacgcagagcttccttcctttgttgctcattccaattttcccaatttgctcggtttcttcttctgatgtagaataatttgcttgccgccctttgatactcaaggttatcttttgacttacctttatcgaagcttttctttaagttctctgcaaaatcatccaatttcgacagatatatatttgccagtattggacttacccctgaaccctgaggagttcctgagaatgtgcagttataaacccattgctccatgtagcctgccttcaacattttccaaataagagccaagaaattttcatcctcgattctctcccttagaatatccaccaacacgtgatggtcaaagctgtcgaaacaggcatgaatatcaccttctacaaaccatgtaattccggtgaattgattctgtatctgctgtaaagctgagtggcagcttcttttaggtctgaatccgtgagagcattctgaaaagttaggctcatatatactctcaagaatcattttgacaacctcttgtactaatttgtcttctgttgatgggattcccagcgggcgtttctttgtgctgtttttcttttcaatatacactcgccttgcgggatttggctgatagctgaagtcttttatgctttcgatgagagcactgattcgcttctcactcataccatctagacttttgccatctacaccaggtgtcatacttccttgtgattggcttatattcttataagctagaaagtaaaactctgggttgtataaattccgatataatcttttgaatttatactgtttgtttgttgcttgttctgaaagacttttcaatacctttactggttctctcaatgtctcacacatccttcctcgttttagtattgaacgataaactgccatccttcgccatgtgggcgttattattcgcttccgattttacggctatccttgtcaattcaaggtcctcggactactacgacggctccgttaccatgctgaatattcagagtcatctctcttgttttttacacttgagatttatcacctctcggcattactcatagccacttgggcatttcagtttaggtaatccccgtttagcatcattatgataagttgtactattgtcggcatgggagttttcgtcattttccattacttatggctagcttgcattgattatcacgcagattgtagacagcaaaatactaatctgccaatacaacaccgtaacatcttcccttcggtgcggagatggttagctccagcctctgactttccttcaaacagtttagctttcatcctcatatagtacctttcgcctcgacactcagtcgcaacttggaagctttgttgacttgtgcctttacaaacgtgctgttgtcccctttatgtttccattcaaggttagttgttggcgataagactgtgttcttcacacttaataatttttcttattgttttctcaaaacaaaatcataatgacccacgtcgcttgggtgtccaccccaaacgccttacgggcgcacggtatcaaccatgataattgttgcttcatcatcgtttagattacgtacaatacagggtattgtttcaatatttgcatattgactggcgaacttccgacgatgtcctgcaatcatttcgtatccaccgttttcttttgggcgaacaagagcaggcattaatacgccaactttagcaatagactcggataattctatcatcgccttatcttctcttactttaaatgggtgatttggaaaatcactgattttatctaaagggatatgaataactttttcagcattatcttcctctcgtgttttttgcgacttaaataaaatatcttcatcgagattgagatctggtatctgcacttcgcttaagggttttcttggcattgcgttccacctcccttgctaatgctgaataggctactgctccttcgtttttagcatcataggtaaatatactttgtcctacacttgacgcctcactaatagctacacgcctaggaatgctcttttgaaatactggaaaatgctgtccatacttttcagtaatttgcttttgaatacttctagactgattggttctgtcatcagtcattgtgattaaaataccttcaacagatagttctggattaatatcacgttttgtttttagaatagatgatattaaatcacttgtacctgaagatgaaagatattcactctgggtaggaatgattacactatttgcagaagcaaaagcattaagcgttaatgttcctaatgagggactacagtctattaatatataatcgtaatcttctttaagtggtacaataatatcttttaaaactgtttctttatcttctaggttatttagtgttgattcaatagctgctagacgtgtatttgtaggaataaaatcaaatccctcatcatggtgtagaatactatcgtaaacacattcatcatttactatgacttctaacatcatgttagcaatgtttttcttaatagcatctacatcatagcctagtgctttacctgaatcaccctgtggatcaaaatcaattaatagaactctcttacgttgtaaagctaaagcactagctagattgatactggttgttgttttaccaacgccacctttttgattagcaatggctatcactttttgatatgtcattttacgacctcctttctttaagccaactcataagaattggctatgtacgcaaaaaagaacagcatgttagtactgttctgttatgaattctagtgcttttatgaataaaccagtggaacttatatgaatataaaataatttaaaatattatgtttggaggtaaaaattcattccatatttttgctgaattgcaatatttttgcctccataaaatgatagcacaaattgcctccaaagccttatactataatgcttttattaactttatatatatgaaatatcctttgtgtattaggtattttatctttttttaactgcttttatattccaacaagttccatttatttctgcaatggtttaaagacttaggatctagcgccttcggcgtgcaggttcgattcctgtcacccgcaccatattgaatgtgttgaagcgataaacatgtaaattgtttatcgcttttttgtatttctaataaaagacggagtggaatagttattgtgcctaagagactgctaaataagaactatcggatcaatgttgatggcattgcaaatattttgtataaaaatgtgtaaatccctatgtagaaaaaatataaatcgattatcattaattacgatatgatattttatatactataaagcatagataaaataaatttacattagcgcaaaagactgtaaaaaaaacagtacattttctgatcataatctttatcttttatatgcagaatttagttattaattatctatatcatgaaaatcaaattgttaaaaaagctgctgatagaattgaaagtaaattgaatataattatagatgatatattttaaagaagaccatttactattatcattttattaggaaactataatgaaaaataattttcttttagagattacagtttttctatggaaattcagagtgataaaaaatgagggtcatgtttggtttaatttgatagagacaaagtatatgttgtgatataataatgctactatgaataagcgaaactaccaaatattaaaatatttaaaagaaacagaggaatatgtaacttctgaaacattaagtgctatgaataatgttagtacaaaaaccatacttaaagatataaaatctttgaattgtgatatgaaagcaacagataattatatagaagtcactccatctcgtggtattaagctggtaattaacgatattgaagaatttataaatttatgtaattcttttaatgatgctaacgatttttcaatttatagtgtgacagaaagagaggaatggattcaaaaatatctgattgagaataatggttgggtcaaggcagaagccttatgtgaaaagctttttatctctcagtcggtattatcacaaaatattaaatccgtacgaaaggcttttcaaaaatatgatttaatattattacaaaaacctcattatggaatgagggtagaaggcagggagtttaataaaagactctgcctcgcacagatttatattacacatattgatcaaagagaagggttgccaactttagaaagtggattgatagggttattagcatatttagcagtatgtcctaatgccattagtacggctgttgagggattgaaagatcctattataatcagtggtttgggttcaggagttattggggcccagggcttatttgtttctatgctcatatcaatcatggctatagaattattaaagggattatcaaaaatagatgccattaaaataaagatgcctgattcagtaccaacaggaatagcacgttcattcaatattttaattccaatttttattattattgcattgtttgctatttgtggatgtttattcgaatcgttcactggtaattacttaaatgtatggatttataacattattcaaattccattacaagcattagcaaatacaacgattggaatcgtggtattatctcttgtcaatcaactattttggtttcttggaattcatggaggaatggttatcgaagggattagaggtccattatcagctgctggattggcagataatattgctgcggtttcagcaggacatgttgcaacaaatattttaacaaggggattttggacaagttttgttgttgtaggcggtggtggaattacactgtcattattaatagctatattattattttcaagacgtgaagatcataaagcaattgctaaattttcaattgttccaggtatttgtggtattaatgaaccggtagtttttggcttaccattagtattaaatccaatttttgctattccatttatttgtaactctgcgattgctgcgttaattgctatttttgcgactaatataggctttttgacatgtggcattgtggattgccctcctgggttaccgatttttattacagggtttataagctatggattacatggaattattatccaggcaatcattttagttgtaactttctttgtctgggttccgtttgtttcagtatcaaataaacaggcggcaattgaagatgcaacagaaaaatctgaaaaagataaaaatatgaatggagaatgattatgaaatttcctacaaattttttatggggtggcgcaactgctgcaaatcaatatgaggggggatggcaagaagggggaagaggtattgctgttcacgatatgttaactgatggaaatcaagaaaatcctagaagaatttattgtaaagctgataatggtaatattacaagtattcaggctggggaatgtattccatttggatttcacccatttattaaggaatcagaatattatccaagtcataatgctacagatttttatcattgttataaagaagatattaaattaatggcagaaatggggtttaaagtatatcgtttatctatttcatggacacgtatttttcctcatggtgatgacaaagaaccgaatgaagatggtctaagattttatgatgctgttattgatgaattgaaaaaatataacatcgagcctttagtgacaattcttcattttgatatgccattgaatttggctgaaaaatatggtggatggataaatcgtaaattaatagaattttatttgaattttgcttctacactgtttgaacgctggaaaacaaaagtcaaatattggattacagtaaatgagattaatgttttaggtggatattggacattaggtcttgcatcaaataataggaagactaaaagtaattctaatcagggggaaacacctgttgaggatgctggaatcaagctgcaggcaattcatcatttattagtggcaagtgctaaggcaaataaaatagctagaaaaataaatcctaattttatgctcgggacaatgtgtgctttatcaggaatatatcctatgacttgcaaaccagaagatgtatttggagcatatgaatttagaagaaaagcgttgatgttttcagacatcacgatgagaggatattatcctaattatgctcaaagtatttttgatgaatataagttcactttaaaaaaagagctgggtgatgatgaggtgctaaaagaaaatacatctgactatttagctttttcgtattatcgtacaacagcatttgattgtgatacaagtaatacaacaacgacaggagggcagcaagcatcacccaatccttatttacaaaaaactgcgtggggatggcctattgatcccaaaggtcttaggtttgttttaaatgaattatatgaccgttatcaaaaaccactattcattgtcgaaaatggaatgggtaattatgatattgttgaagaagatggagcgattcatgatgattatcgtattgagtatttgcgtagtcatattgttgaattcaaaaaggcagtagagatagatcaaattcctttactcggatacacgacctgggggtgtattgatattgtatcggcgggtacaggagaaatggcaaaaagatatggttttgtttatgtggatttggacgataaaggtaatggtacttttaaaagaaagaaaaaagattcattttactggtatcaaaaagtgattgaatcaaatggcgaaattctaggctagattattttatttgtttaaaattatgttatttaaagggaacggtttctaaaatcacttcttttttagtgggatagtgaaacaatgtaccagaattatactatttaatgaaatattgtaccaaaattgtatagacagatttaaaatgatactaaataatagtatattaaagatatactagtgggttgttactttaggtaggcaagaccaaaaaagtgtaatactttttagtcttgtctttttgattaaaatacctgttctaaaaggagggaataataaaagtagacaatatacattgagtaaacaacacacaaattagagaggtgaggaagatgaagaaacagttaaaaaaaataatgactattgtcttaaatgctggaatggtaatttcattattaggaacaccatcttttgcagttgaacatgtagggacaagcgatgcggctaaagaaatgtataagaatacatatgctaatttaacgaatcgaattacgaatcggggttatgcaccgacttctttgacaggggcttatgagggaatgtttattcgtgatagttcgattcaagtaatggcacaaaatgcttatggtgattatcaaaaatcaaggcaagtattaaattttttgttgagctatcaacaaggactaggggcagattatgctcagcatatcgttcctgattatgaagatgaagaatttgggaactcctatctatcccagggagaaacagcacagacacaaaatttatatacctcacagactttttctgatcatgcgttatttgggttaaaaggaccaaataacggtggtggagtagcatttcaaacagatagtgataaagtaacatcaatttctattttcactaattctactggaaatgatgttttaactggaagtttgcgaacaaatattacagatgcttcaacagagttgataagtaaagagattacagttactgctagtggctggcagacatttacatttgaccagccaattactgtaaaaaaaggagaaacttatcatttctttgtacaatctaataatggtattgctatgttcggaaaggctgatgggaaacctgcggataatgctattatgggttataattatgatgttccggttttaggcggctttgcagaaagcgcatatccggcatttaaattaaacggaaatgatgatgaaaaaacagataattcatttatgtcaaatacagatcattcgattgctttatttttaattaatgcaactactaataattctgcttttgcatttgtgccaaatagtgattctatctgttcgtttcgagtttatttaaccggaagtgctcctgttacttttaagttgacaactgaacctggaaatgaggcaaaaacaataaaaactatttcacaaacagtatcaagtaatggctggcaaacagttgattttggagaaaatattcctgtgacaccaggacaaaaatattatgttcatattacaacaaccagcggtcaagttattgcttgtggttcttcaatgtttgcgggttctgtagcatctatgaactgggaaaataatgtttggtcacaaactggttatgttattgcagcggaagtattttcagaagttaatattgctcaatcaccatatgctcaaaaaatttcattaaatggtgatgcaattcaagccgtttcttttactgctgatgctaaagtggcaggtggtaatttgattggtgaattaagagaaagtttaaatagtaaggctattgcttcaggggagatagcaattgaaaaagctggagtacaaaattatcaaattgattttggaaaagaagttaaagtcgctgccgataaagattattattttgttttatgggctgaaaataatgattatgtacaatggaattataaccctgctcttaaagcaagcgcctatagtttaaatggtgataattgggatagtcatgattttgattttgagttagatatcctaccattatattcgggtgattatcgagtaccgcttatgacaattggagataaaaatattgggattcaggaaattccatctttagatcaatatgtaacggctgtagatgtattgttaggtaaaaataatttagaagagggaattgctattgcaactttatataaaggatatggtgcagaagcaatcaaagtagatgacgctgcgattgatatttctaagctatcttcaagtgggcaaatggtacatttagaatttagtttatcgttggaacaagtcgataaaacgcaatcttattatttagaaattaaagctccacaaaatagtgataatacaattacttggtatggaagtaaaaatgtggataatttagcaacattatataacgggactgcagtagctggagaggcaggctatgttgcatataaatccaatcttcatactttatccaatcatgttcaaattgatgggaattatatgttgatccatgcatgggctcaatttgttaatggatgtaaaaagacggtagaaaatcaagagtttatcaaaaaatcctatccaattattaaaagatttgcaaattattatattgatcaaggatacataagtgacgaatataatttaatgagaaatgacagttttgagcattcacgtgagggaagatattggaaatcttatgatttaattacaaatgtatttgcatcacaagctttgtatgaactaagtgctttagcaaaagaatttggcgatagtgattcagcaattaaatgggctgatacttccgcaactttaacaaagggaatcaatgaatatttaacaactgaagttgatggagttaaaatttatgctgaattatatgatattgataataacatgaagtttattaaaggaatgtcatgggtcaattgggctccaatggcagctcaatggtatgcaatggatgaaaaaatcatgcaaaatacttatgatatttatgcaaaatatgatagtcaagattatgatgattataagatgttagatgttgtctatgattttgatactcaacaaagtggaaatcatattattggtaaagggttagcatgggaaattatgtttaatcgcgtaaaagacgataatgaaaagttagattatttagctagttttattttagatcattccactcctggtggtgtttatcccgaaacatatcaaccaaatggaaatttttcagatgttggaaaccaagagcatgcttcttggcagcattatgcaatgagctgtgcttatccagaattaacaaaaacatattcacttcaaatattagaagaattaatcaatgaaattcaggtgttagatgcaaagctctatacactagactcttatgcgaaactcagtcgagcattagatgcagcaattagtggctataatgttgaaaatattactaaagaacaatgcgatgcattgtacgaggcacttttagcagcaaaaaatgaactaacttatttagatgctgattatcaggctgttgatgcggctattgtagctgctgaaaaattaaacaaggatgattataaagatttttccaaagtagaagcagcaataaatgctgtagttcgtggaaaaaatattacacagcaagctgaagttgatgctatggcaaaagcaattaatgatgcaattgatactcttgaaaagaaagagggcagtgttaccccaattaactcgattaagccagttgacaaaaagccagtagtcccaaatacgggggatgagaatttaatgagtctctatatctctttaattgggatcatggcaggtctgtttgtaatcataaagaaaagaaagaatatttattaaaagaagaattcctaggaattcttcttttgcacctgtttaaaattatatgttacgattttatttttgcaggtaaaaacttaatagtgatgaatccgacaaaaactaaaaacatgatagcaataaacaaaacagaataaatactttcattaaagaataattgacaaagataaactagaaatgagggaagaaagccaccaattccagcagctattcccatatatccgcccacagctgcattacccttttctttagcggtctgcgctgcaatcaagaagatatataaaataatggtattataggtaaagccgaagattcccgaagtaatatacatgctgatgtaacttttcccaaaaatgtaaattgctaaagataaagcgcaaagaaataaggaaatggggaggaaattattcttgaatttattatatatcttattaaataatagacccgaactgattgaacaaatagaattaatgttattagcatggactgttattacagctatgtctgcaaatgatttcgtagcaaacaaagttgacaaattaataccaatcgatgacatcagcatatttaagattagaaagaaaatactgatggtgagaagtttgatgtttttttcttttttgatagttgatttggatggtgcttttaaaggaatatcaggaatataaaaagatagaataagtgttattactaaaggtaaataaccaagaaacataaagtcagttgaaatcttgcttaaatagccaactaatgtttggaagaagattgcacctagactggaaatgatcgttgtataacctaaatacttgatttgacgattatcagtgtaatattctaaaatgatggatttatttaaagaaatggcaattccgattccaataccaaagagcagtcgtaaaaataatcttgaatagagctcgtcaataaagaatggaccagtcccaccaaataaaagagcagcgttcatcgcaatcaatatagttcgataagaaacttttgttccaacaaacttactacaaaaatatgaggtagggataacagctatagagggaatcgtgatgattaaagagacagtagacataggataagcagaatattcttgatataacaaattcattcctggaattattgagcctctaatcgatgaaactaatgccacagataatattgataacaagatcagtttgtttttcattatatgttgataccaccttttaattaacattagcaaatattaaattataaagcaataattgtgtgaaaaagttgtaatattaagataaaattaaatatttaaggttaattttgttgtattataaaaatataaagataatttggaggaaaaaaagatgaagaatgattgttttagttttattaaattttgtaatgaaagaatcgcaaatagtaatgattataatattgctagaacgattattaatcacattgaggatattaaaatattatcattagagaagattgcagaagaagctaatatttctcctgcttcagttagtcgtttcatcaataaagctggttttgaatcctttcaggcttttaaatatgaatttgagttgtttactagggatgttaaaatgcgccgaattatttctcatactcaaagatttatgcggacgacgattgaaaatatgagtgaatctttatatgttgatggtcttgctaacttaagacagactaaattaaatttagatattgataagttaaaagaaattgttaagttactcaaaacttcaaaaagtgttacatttattggtgatagtcatgaactggcggatttttatacgctgcagttagagatgttagtcaacgatattccggcatatttgattaatttttatgagtttgaaaagatgtatctaaaccagttagatcataatgatactattgtttttattggtgtatataaggaatggttttctgatgctcaaaaagagattttagattatgcaaaggaacgtaaaataaaaatcattgcctttgttcaagaagaagattatttaaaggagtatgctgatttattatatgtttatggaattcctgacagttataatgatggttattattctttgccatatttaaatcgattgttatgtgaaatgatttatttcaaattataaaacctgcttggaactaatcgatatcattgttcacaagttgatcaagaaactcatcataacgcttcatcacatcatatgtctgcgggtaaatatcaaattattgaaacgattatgtcttatacttcacaatattcttttgctgaacttaataagtttagtgttcaagaaatgtataatattttagctatatttaatcaagaggaggttcctgaagggtgtcagccagggcataatcaagatagtcatcatagaaatcataatcagcctaaataaaaaatcataaactataatactgtttatgattttttacgagttgatttatcattgttgaaaaaattagcatatttataattataccagattttcgagtaattaaattttttgccgtttgaaaggaaaacgttatcatcgataattaaaccaaaggcaccaggttctaggtttaaaagctcttgatcttcttttgatagtggtttagcaaaaatgtatttttcagaaaagccgatcgtaagttttaaatcattaataataaaagaaaaaattgatgtttttgcaatgtcttcattaagataaggaatgatgtctttgttatagtaagtatattcaacagcaaaagggatatcatcaatatacattaatcgttttattgcataaactggagtaccaactttacattctaaatgttctgctagatcagtatcacagtcaattaatttaaaacttaaaatatcacgttctaatttttcaccgggatgttcagctgaaaaaccgattgtgttatttaatttgatagttcctttatttggttttcgaatgtaaaaaccactaccatgaatagcaaataacaatccatcattaaccagcaaattaatagcattgctgatggtgtttttactagcatcatattctttcatcagctgcccaccagtaggcagtttttttgtttcttcaaattcaccattttcaattcgtttctttaaatcaatggaaattgtttcgtactttctcataatatctcccatccttatttataaaaatatcatttaattattattttgtaaagtgtttggtaacaattttgcatatataggacaaaaaagaaaccccttacattttgtattgacactggtattaaaacgttgtattctaaaagtagataacaataaaattgtttggtaacaatcgcaaaagatgtagaaaaggagtgtgaatattgataataaatgtgttagtagtttggggaaataaaggggataaacgaatgaaatagtgtttattttggaaaggaaactttattatgaaaaagagaggtaagattgtttcgttattagttatagtggcgatgttttttagttatattgtaccaatcaaggctcaaggaaattggcaacagcatttagatcaaactatcttgaaagtgggttatacagaggtttataaagataataaaccggtagtaccaaatgctaatctgacaattacgataactggaacgggattgagtggtaaagaatataacacagtactgattgatgaagaagcaagagaagtagaagcaacaaagcaaaatggggtaatcaatggtgacactactcaattagtgctgcaagtaccaggaacattgtcagggggtcaatatcaagtaagaacaacgattgatagtgaaagtgttacaaatggtctaattttattaaataatgttaatttaagcagtaagatcagtaccaacgttactggatattcaggagtaacaggcgatttaattgatggtattcagtgggcaatgtatacgcccgttacaaataagccaactagagaaaatccaggaatttttacatttgattatggagaggatttaatagatgtgtattctttagatctatattcaacatatggaaatgaccaaggccctaaagttgcagaaatattatattgggatgatagtagtcaaacttgggaaaatattttaaataatggcagtcgtgaatttgaatttaggtgggataagaatattgaatgtgagccatttcgaattcaatttgatcaagtttattcaactaataaaatcatgttaaaaacattagattcatatactagttgggaaaatacgaatgatattgttgaagtacaggtatggggttataaatctggagagttaccatctattcaaataagttcttcacaaggaaattatggtgtgaaaaatattgtaccaatggtaataaaaaataagaataaatctactacaataaatttagagttagtcgattttaaatctcatcaatcactagcaagaccagtcaaatatcaagttgagatgaaaaatggtaaattaaattatgaatttgtaattcctaagacagtaccagtgggtacatatagtattcatgttacttgtgagggattagatctttatagtgatgagtatcgtatttcgttagatcaagatataaatattgaaaactgttctaaatatttagatatttctttggttaatgatcaagcctataaaattacaagtataactgatggtgacataaaaagcggttggagtaataatgggaatacgtctttattgtttgaagttaaacctgaaaataataagtttgccaatattgcattaaagaaaatgagaatttatacgagtaataaaaacattgaaactgttaccttaaaaggtattgcgaatactaattattatcgtaatgttaatgtcaatgaaaatgggatgatcaatgatttagctggtgattttaaaccagactggaaaagtgataaaaatggggattattttgaagttgatcccggttatttatctttggaaaatatatttattttagaattacaaagtaatgaaaatattgtaatcaatgaaattgaaacagaaggtgtatatttaaaagataatcttttatcaaatgcccgagtttatcataatggtgaaaatattgatgcagctggaatggttgataataatgtaagtagttattataaaactacatattctgatagtgatgagtatatcttagatttttcaccacggacaattacaactaatgaacttgtttatacggcacattttcctaattcacaaggtattggtaatttgactgtggaaatttgggatggtaatagttggaaaaatgttgatacatttgattttaaacataaaaccgataatcaaattagagaatcacagcagcttatttttaatgaacttacaactagtaaaattcgcttgatcgtaaataaagctaatctagtttgggataattcctatttatttacagatttaaatgcaattggaacaataaataataatgctcagtactatgctgaaagtattgataccaatatagttgtaaatcaaggtgaaagcaaatttccaattcctcatttaaaaggctatgaggtatcgatcaatagttctgatcatgaggaaatcattgatttaaatggtaatattaatgcacctttgacagatacaaaagttaaaataacattaaaggttagtagtgaagatggtcaggatgttggtatcacagatgagtttgaagttgttgtaccaagaagagttttgcccggcaataaattgatttcaactattgttgataatgaaacgatttataataatccgtcaatgggatgggttcaatattatgaattccaagataccgatgttgataaatattgggctgaaatggatgaattatatgctcaaggtttaaagacaaatattttatatattcgtaatccttggagctggtatgaaccatcagaaggaaattatgcatggaatgatcctgatagcaggttgagtaaattaattagtggagcaagagcgcgaggaattcaattagcttttagggtattggtggattcaagtgatgcttttcagcaggcaacaccagaatatgtatttaaagcaggagcaagctggtataaaactgatcgaactgatgatacggcaccagaaatcgatgctaaagatccatatattaatgatcctgttttcttagaaaaattagataagtttattaaagcatttggtgcagagtttaataatgatttagatattgcttttattgatggtatgggctttggtaactggggtgaagcacatcacgttaaatttagtactgagtgggatgataatgtttatggtgcggttgaaaaagtgattaaaatatatgataaatatttcccggatgttttattgggagctcaagaaggacaaccagaaaattatgggactcaagaaaatgatgagatcattaatactgacaaaccttatactggagcatttgacaaagaatatgattttgttgttcgccgtgatacatttggctggatgacggatgcaattagaaatcaaacattagaatggtttaatcaaggaataccagtttttgcagaaaattgttatcattcatttaaagtacgagaatactggtataataatgctggttatccgactttggatggtattttacgtcaggtcgtagctgatgctttgacatgtcgagcaaatactctagatgctcgggttgtaatggactgtcagaaatggctagagaatgatcaacaaaacggttctggtttattgaataaatttggtttgaatggtggctatcgcctcgctttgactagtttagaagttcctgagcttttcacgactggggaagaaataacgattaaacaagcgtggcgtaatttagggctaggcatgttgccgaataaaaataaacattgggataataaatatcatgttgctttcgcattattggacccaaaaacaaatcaggttatttatcaatataatgaagatactgataaagtaaacccgggtgattggcttttcgaagatggaaataatcattatgagactacatttaaattgccaaatagtattaaatcaggtgaatacaaactagcaacagcaattgttaatgataaaaataataatcttccggaaattgctttagcccttaaagatgcggaagtgacagagcagggctggtatgttttagatagtattaatgtaaaaaatataaatgattcagatacaacatttggtatttttattgaagatactgtaaatggtaaagttatagctgataggtcaactgttaacgctggtgaaagcgttactttaaaagttgttcctgaccaaggctatgaacttgatcaattactaatcaatgaaaaggcagttgaaattaaggataactcatatatgattaaaaatgttacggctgatattcgtgtaagggcctcatttaaaaaagctggtgaagtaaccgtaaaacctgatgagtctaaggatagttcagtagtagcaacgggagatgaggttcaattatttggatatataggaatgtttatcggagcattagttttattagctgagttgaaaaggaaatttaaacatcagagctaaaatataaaagcaggtaatttacctgctttttccacatataattatatttactaaaataataatcttttattagtaaattaattgacatggtttacgtgattaactataattgttagtgcataggattgttactatttgattaggcaagacctggttgtttaaagcgtttataagcgtgatgaacaatcaggtcttttatatttatttgggaactttaactaatcaaaatagctattctatacgggaaaaggaggaagttatgaaaggaagatggaatcaaaaattatgtgctgtagcaactgtttcaatgttgttatcatcagcaccagttggggtattagcacaagaaaatgcaagaattactcagtcagaccccgaagaagtatatgttgatatcattggagatgggcaaagaaccacgctatttaatgaaaattggaagtttcatcgtggtgatataaatgatgctcaaaacaaagattacaatgattcaacttgggaaacggtgaatttaccacatgactatagtattgatcaagatttcacaacaagcggagaagcagagagtggttttttaccaggtggcgttggctggtatcgaaaaacttttgtagtacctaaaaaatatcaagaaaaacaattgatgattgagtttgatggcgcttatatgaatgctgaagtttatttaaatgggacaaaattaggtgagcatccatatggatatactgcttttgcatttgatttgactgagggcttaatctgcgatggtgagactgaaaatgttttagtagtaaaaactaataataaaattccaagtagtcgctggtactctggaagtgggatttatcgagatgtaaagttaacagttacagataaggttcatgttggctataatggaactaaaatcattgctaaagatttagaaaatactaaggacaataatgttaaagttgatgttacagcaacaatcgataatgatagcgatacaaataaaacgatcacagttaaaaatactttattggatgctcaaggaaatgccgcgggtagtaccgtcactaatgaagttgaattagcagctaaaagtacaaaagatgtaaaacaggaagtgtctgttattgctcctaaattgtggtccactgaggatacaaatttatatacaatgaaaactgaaatcgtggcggataataaagttttagatacttatgaaactgagtatggtttccgctattttgattttgataataatacaggtttttcattaaatggtgaaaaaataaaattaaaaggtgtttgtctgcaccatgatcagggtgcactaggagcagttgctaatcgtgatgcaattgaacggcaggtcaaaatattaaaagaaatgggatgtaatgcgattcgtgttacccataatcctgcggcatcagttttattagaagtatgtaatgaaaatggaatgttagttattaatgaagcttttgatggctggaccgaatataaaaatggaaatgttaatgactacacttcacattttaatgaggtaattagtaccgataatcaaattgttaatggaaaagctggaatgaagtggggcgaatttgatgttaaagcaatggttgatggtgctaaaaatgatccaagtgtaattatgtggtcattaggtaatgaaattgatgaaggagtatcaggaaatacctcacattatttaaatttagttgatgatttaattaaatgggttcaagaggttgatacaactcgtccagtcacaaatggtgataatcgcaaaaatactaatccaaatgcgatgctcagccaaattaatcaaaaaatatatgaagctggtggcgtggttggaatgaactatgcaaatggtgatcaaactatagctatgcacaatacttatagcgattggccactatacggttctgaaacggcaagtgctgtccatagtcgtggagtttataatactacgggtaaagatgataatactttacaaatgtcagaatatgataatgatgaggcaaaagttggctggggacattcagcaagtgatgcctggcaatttgttattaagaatgatttcaatgctggagagtttgtgtggactggttttgattatattggtgaaccaacgccatggaatggaactggagcaggaagtgcaagtggtcagggagctaaacctaaatcatcatattttggaattgttgatactgcaggatttgtaaaagatacttattatttatataaaagtatgtgggacgaagatacaactactttgcatttaatgtcaacatggaacaatgatgaaatagtcaaaaataataatggtaaggtcaaggtcgatgtatttactaatgctgcaaaagtggagttatatttaaatgggaataaagtgggggaagatacagcaacaacgcatactactgctttaggatataagtatcaaacattttcaaatggagaattttacccaagctttaatgtaacctgggcttcaggaacgttgagtgctaaagcatatgacaaaaaaggtaatttaattacagaaactgaaggaagaagcagtgtaacgactaataccaaagctgcaaaattagcgataagtgctgataaaaaggaaattttagctgatggcagtagtttatcttatcttactgtcgatgttaaagatatgaatggaaatattgtcgctggagctgataatcgtattaatttcaagattgaaggaaatggtaaaattgttggggttgataatggtaatgcagctgatactgatagttataagggaacttcacgaaaagccttttcaggaaaggcattagtgattgttcaatctactaaagatgagggatcatttacacttagtgccagcagtgatggtttaagtggttcaaatatttctgtcaagacggttaaaaatgctgttgagggtgatgcttatctgcaaagttacacaattgctaaaaatttatatgttaatgttggtgaagaacctgatctgcctgcaaaagttgtaggaacatacaataatggggagacaagagacttaacgattaaatggaatgaatatgataaagaatcattaaataaaattggtgagttcacaataacaggaaaacttcaggatagtgaagctgtagtaactgtaacggttcatgtaattggtaatgtcgtagccatggaaaactattcaacagtaactagtgcaggaattacaccggtattaccacaaacggttcgaggactttatgaaaatggaaattatagtgaggcttttccggttaaatggaatattcctgctgatgcttttaaaaatgaaggaatggtaacagtaaaaggtacagtcaatgttctaaatgaagtaaaagatgttacagcaactgttcgagtagcaccaaaattagctgattcacagaatattgcttcaaagaattatcaagatacaccattatttacaaatgggaaaatggtcaatggtgttccaagtgaaccaacagcaacgccaatcaatgattcattgagtgaattaaatgatgggattactaatgaaagtggacgcgaaagcgcacggtggacaaattggagtttaagaaatgaaaatcctccggtggatacttatgtacaattagaatggcaaaaagaatacttgatgcaaaatattaaactgtggcattttacggataatcaattcagtgttttaccaggtgataacaatgtccggtttgaatattatgatgttccaacaaattcatggcaagaaattgagtcttcgcacattacacaagtaccatatacatctggtgatactccatatggatttattcacccgattacaactaataaattacgcatatggatgaagtcaccgcaagttaataaatgtattggtttaacagaaatagaagtatatgattatattttaccagtaactgcaaattcatctgcaaatctagatgatttaaaattagatggggttaatattaaagaatttaatggttatcgagggtatgataagcttactaaaacatatactgttgatttgaaaacagctgataccccatcagttatagctcaaggtaataataatgaagcaattactgttttaccagtatataataatgaagtaaagatcattgttagagcggaagatggtaaaacgatagaaaattatactattaaatatattatctcggcaaacaaagagtttcttgaaaactatattgaaagcgatgaaataaagaaagtttttgaaacaagtgaagaatatacagtccaatcgtatcaagaatttaaggaagcatatgatcaagcaatagtgattttgaaagatgatcaggcaacacaaaaacaagttgatgatagttatgaaaaattacaaactatgtatcaagctttagttaaaaagactgaagaaaaagttgataagagtcagttagaagcacttttagctattgctgataagattactgaagatattttaagtagtcttgatgctgatttagttaaagagtttaagaccgctttacaagcagcacaagatatttatactggaaatgatgtaactcaagctcaggtaaatgctgctattacacggttaaatgtggcaattgaaaatttaaatattcgtgatttcaataagattaaattacaggagctagttgagcggactgaaaaattatctgctaaagattatacaagggcttcttgggaacgattagaaaaagctttatcagcagccaaaattgtcttagcagatgaaaaggcgacactggcagctgttgatgaagccaaaacggttttacaaaatgctctagaacaattagagaaagttgcgattagcgaagagtcttctcaaggagtaaaaactggtgatgcggctaattttgctggtatatttgcattaatggtttcaactgcgagtctggttttatggatgaaaagaagaaaagaaaataattagtaataatagaaggatgttttaatatgacatccttttttggaaatttgacatttttatgattatcgtattcgttgtatattcttactaagattgtataatataagtatagaaaaaggaggcgtttaaaaatgagtataccaataattattgtacttatagtagtggcgttaattgtgatttactgcatagttgcatataacacattaactaaattaaagaaccgggttaaaactaactgggcacaaattgatgtggtattaaaaaggcgggctgatttgatcccgaaccttgttgaaacagtcaaggggtatgctagtcacgaaaaggaaacgttagaaaatgcaataaaagcaagaaatacttatgtgactgccaatagtcctcaagatcagcttgcagcttctggtgaattaaatcaggctttaagccgattaatgatgttaggtgaagcttatccggatttaaaagctaatactaattttatggaattacaaaaagaattgacagctacagaagataaaattacgtatgcacgacaattttataatgattcagtaaataaatataccaatcaaacagaagttttcccttcagtgcttattgcaaaaatatttggttttggaacttttgattattttgaggttcaagaaacagataaagaagtaccaaaggttaaattttaaaatgaaacttaaaaaattatttttagcactctcaatctttctggtttctttgatgccgttacctgttttggcatcagggaatgaccttcaagcggttaatatgaacatttatattaatcaagatggttcagcaaaagttgaggaaacttggaagatggatgcgattgaaggaacagaaaactacaaggcatttaataatctttatggggctacgatcagtgatttttctgttgtcgatgaaaaaggaacaaaatatcaatatgttgataattgggatattgatgctagtcgtcaagagaagaaaaataaatgtgggatcattgaaaagagtgatggttatgagttatgttatgggataggtgattatggtcaacacacatatacgatgacttatacgattactccatttgttaatcaatatagtgatgctcaggggtttaattggcaattacttaatcaggaaatgaatcctaaaccagctgaatttgaagcaacgattagttctgattacaagttttatgatcaagatagtgatatttggggctttggctatgaaggacaagttatttttgatgatcatggagcgataattatatcgaatcgtgatttaaacaataatcgtcgaggcgatattaattatgttaatattttagttagagtacccgatggaacttttagcaatgcaataaccaaaaatgaatcatttgaagctgttttagaagatgcacgtgatggctcaagttatcaagaagattctagtgatggttcaatatttatgtttattggtattagtgttgcggtacttgctgggataattgcagtaattgttggagttgtatctaaagcaaacaaaaataaacaattatattttagtgacggtaacaatgaaattccgacaatggaacatgttaatccgttccgtgatattccttgtcataaagatatctactatttttattacgttgcaacaaaagcagggattatccagcaagatgatcgttcaggtatcttgtgtgctatgttgttaaaatggatcagagatggctatgtgaattttaccatggaaccgggcactggctggtttaaaaaagataaatatgaaattgatttcagtggtgagattccaacagaaaatattttagaagaaaagatgttaggttattttcgggaagcaagtggtgataatcaaatcttagagaataaagaatttgaacgttggtgtaaacggaattatgaagaaatcgaagattggtttaatgatttgattgaatttgaagaaaaagaattaaaagaaaaaggcttaatgaaaaagcaaacaacttataaaaagttcttaggaatagatattgcaaatgaaaaagtagtttatgaaccatcatttagagatgatatcatttatactaagggattaaaacgctttttattagactttagtagtattgaagaaaaagaagtaattgaagtaaaactctgggaagaatatttaatgtttgcttcaattcttggtattgctgacgaggtagaaaaacaaattggtaaactctgcccagaatttaatcaatattcaaatattgattacacttatacgatgttagcaacgagaacatttatgtatggtggtgttcgtagtgcagctaatgcatatagtgcagctcatagttcatcgtatagcggtggcggtggttttagttcctttggcggaggcggaggtggtttctccggaggcggcggaggcggaagccgataaaataaagaaaacctggaagaatgaaatgaacctcctaagttgttgcttcaacttaggaggttcgcttcaaaactccaggttattttattgttgtgcttctaattcagcgattttatcagcaaattgaggtaagtgttttttatgagcaatcaacatttcatctaataatgttttagcaatttgaccacttggaactaatggattaattgtaaatgcatgtaatgctttaccataatcaccagtaacggcagcttcaattgtagtttcttccattgctttcataatttgaaccattccccgagctgcaggttttaatgttccccaagaaattggcattggccctgctgctgtaatgatagcagatacttcagctacactatcatatggaagatcagttaatgcccctttgttttgtgttgatacgaccatagttgtacgtttatcattatagattgagttgattaattcacaagcagcatcactataataagtaccaccacgttttgtcaattgttctggtttataatctaaattaggatctttatataattcaaataattcagcttctgttctttttacaacttcagcacgagtaccattttctttgaagtcggcaatttcatcttcaagcatatcatcagtgatatagtagtaacggtgatacatacatggcagatatcctaaatcttggatttgttctgcaacaaatgaaatatttttaatatttgctactccggcatcagcggcacgtttagcggctttttcctcttcttcctttgcacgtgtagcattagccccaaattttcttaaaccatcgttttcaacatatagtttttgaattgctttatcagttaattcagttccatcaacatcccatactcgatgccagtgaaaatggtttaatccagcgaatttaaagaataattcttcttcgtttttatctaaagctttcccaaccattttacggcaagagataggtacattacataaaccaacaactttatcccatttaccatatttgataacagcttcagtaaccattccactaggattagtaaagtttactagccaggcatttggacatagtcttttcatatcttcaacaatttctaagataacaggaacagttctaaatgctttaaacattcctccggcaccatttgtttcttgcccaataatcccatgacttaagggaattctttcgtctttaattcttgcatccaataagccaactctaaattgagtagtaacgaaatcagcgtcttttaaagcttcttcacgatctaatgttaaatgaatcgtcataggaacacccgcagcttttaccattctttgtgccattgctccaacgatttctaatttttctttaccttcttcaatatcaactaaccacagttctttgataggtagttcatcatatcttttaataaatccttcaactaattctggagtatatgaactcccgccaccgatggtagcaatttttacaggtctttttgccatttgtaaatctcctttgttttttgttacaaggctattataacggcaaaagaaaagaaagtggtcttttttcaggtgatgaaaaccgctttcattttatgaaaataatataataagttatcgtgcttatggtaataattaatatattattttaataacaggttgtatggattgatagttccgggaattacttgtaaataatcattttttaataattcattgattacattgcataatatattaatatcggtttcttcaccagtacattcaagatagagactttgactgccacaagcatcacgtaatttgagaatgtagtcaaattggcgttcttttaataaattattgatgtcttggacttggaaaattgaaattgttttcatgtttttaactccttttgttaaaataatgttataatttcattatataaaagtcaaggaggatatataatggctgcaactgaaaaagaaaaagcaaccaagctggctcatgagttagtcgcatacatagagagtgaacaaagtgatttgaaggctagtgataatgaatttgatgctttatggcaaagcatttatgatgtttgtatgctagttcactttaacattttagatgaactcttgagtgaagaggaatatttagaaggagttacttggctaaaagactatcaacatctcactaaagattaccaagataaagaattggaattatgaaaggataaagaataatgaaaaattatttagttgttaccgatacaacaagtgcgatgaacggggttcaagcgaaagaatctggaattgagttagtctcactaagtgtactgattgacgggatcgagtacaaagaccaaattgatatttcaacggaagaattatataaaaaactggaagctggatgtatccctacgacatcacagccaaatactggatatttacatgaattaatggcgaattggaaagctaaaaattatgaagctattatcattatcacctgcagtagtgatttaagtggaacttggagtggatttaatcttgtgaaaaatcagttagaaatgaataatatgtatatttatgatagccgccaagttggtgcacctgtcatggatatggcattagcggctaaacagatggctgataatgatcatgatgtaaatgaaatttttgaaatgttagaaatgaaaactaaaaatagtttttcttttttagccccatttgattttaagcaattggcgcgctcgggacggttatcgccggtagctgctaaaatggcatcaatcttgaaagtaaaagctttactttatttgaaggaagatggtagttgtgtcgataaatatgcgatgagtaggacagaatcaaaaattgttaaaactgtaattgacaaatttaaaaatgctggtgttaatgctaaggattatacattatacatctctcatgctgataatgaagaatcagcgctgaaagcaaaacgattattacaagatatttttgataatattgaggttatcgtaaacaagttaccagctgtattgacttgtcatggcgggatgaaatgtatatctgtgcattatatacataagatgtaataggtgagaaaatgaaagttgttgatatgcattgtgataccatcttgcggctttatgatgaaggtggctgtttatcaaaaaatgattttaatattgatttaaagaaaatggttaaaggtgattatttgttgcaaaactttgcgatgtttgtaaacttaagtgatcatcttgatccgctaacaaaggcacagcgattaattgatctatattatacagaactagaaaaaagtcctgagctgattaaaccagtatatagttatgaagatattcttaataatcaaaaaaatggtctaatgtcagcgatgcttacattggaagaaggggcagtcgtaaataatgatcttgcaatcttacgtaattattatcgtctaggcgttaggatgattactttaacttggaatcatcctaacggaataggttatcctaatttgattagtactaaggaatttaaagatttatatcatttaaatacagaagatggattaactgattttgggattgcttatgttaaggaaatggagcggttgggaatcattatcgatgtttcacatttgagtgatgcgggattttatgatgtattaaaatatacgacaaaaccgtttgttgcatcacatagtaatgctcgtagcgtttgcggagttgctcgaaatatgtctgatgatatgatcaaacagttagcgaaacgtaatggcgtcatgggaattaatttttgcggagatttcttaaaaccatcgagtcatggcgggatgcgttcatgtattgaagatatggttaaacatattttatatattaaggaactggtggggatagattatgttggcttaggtagtgattttgatggtattgatcaaaaccttgaattagctgatgcttcgatgatgccccaattagctgctgcactgcaggaagctggctttagtgaaattgaaattgagaaagttttttataagaacgttttacgtgtttatagtcaaattttatagaaacagaaaaacgacaagtggggaaatcacttgtcgcttttattattagttatcagggaaaggatactaataatacatgatatcagggaaggatatctttatatattgtttgtagtcattatattgaagggaaaatcgaatatttcttttgactacattgttagtatataactaaacaatggtgaaaatgtatatagaatatcttaaaatatgtgataattattcgttcggatagatatcgagctattttaaaatggcgaaatatagtgtataatacacataagtggaggaatgaggatgaaaagcttattttatcgtttaattatctttttagatacagctagtgaagctgatacaaattataatattgcctggtatatggctcataatttttcgaaagtggccaaaatgggaattagtcagcttgctaaagaatgttatgtatccccggcaacgatttcacgtttttgtcgtgctttaggatatgaaaattatgctcatttaaaacaagaatgttcttcatttgcttcagatagcaaaaagtttaataatttaattaatgttcctttggacatgatgaaagataaacctcaagaatgtactaaatattatagtgatcaagtatgtgatgctatttcaaaattgtcacagcggttagactggaatgtgattgataaagttctacaggctattcatgatagtgattcagtagctttttttggaactcagttttctcattctgcagcgttgcattttcaaactgatttactaatgctggaaaagtttacaatggcatatatggaaacagaacgtcagattgattgtgcgcgtttgatggatgaaaatagtgttgcaattattgtgacagtaaatggattttatgcacggagtaattcgaaagttttacagtatttaaagaaatcaaaatgtaaggttgttttaatgacaaataatccagggatagatattggaataaacgttaattatacgattgtattaggtgatagcgaacagcgaaagattggtaaacatacgttattaacagcagttgaattgatgtcactgcgatattattctttatattatccaggaattcaggaaaaaattatctaaaaaggttttaacctttttttatggaaggaaaaagttatgcgtgagattaaatgtgaagatattacaaaaacagtaaaacaactatgtatggaagcagcttgtaatttacccagtgatgtgtttaaggcacttaaagataagacagatacagaaccatatcccttagctaaaaagactttggaagtattgattgataatgctgatttagctaaagataatatgatgccgatttgtcaagatactggtatggcttttgtgtatattacaattggacaagaagttcatgtggatggtgatttaaaagctgctattaatgaaggagtgcgtcaagggtacgaggaaggttatcttcgtaaatcagtagttgatgatccattatttgaacggatcaatactaaagataataccccagcaattatttattttgatcttgtttgtggtgatgaatttaaaattgttgtagctccaaaaggatttgggtctgaaaacatgtcacaaattaaaatgttaaaaccaagtgatggattgcagggagttaaagattttgtaatgaaagtggttaatgacgctggacctaatgcttgcccgccgatggtgattggtgtagggatcggagggtcatttgacaaagttacgatgttgtcaaaacaagcaatgatgcgtgaaattggaacccatcacaaagatagccgatatgctgctttagaaactgaattattagagatgatcaatgctacaggaattggaccagctggttatggtggaaaaactacggctctatcattgaatattgagactcatcctactcatattgctggaatgcctgttgcagtaagtatttgctgccatgtagcgcgtcataaggaggcttcattatgattaaattgacaacaccgcttaccgttgaaaaaataaaacaattacatgctggtgatgaagtgttactaagtggaactatctatacgggtcgtgatgcggctcataaacgtttgatggctttgattgaagaaggaaaggaattaccttttcatttagaggatcaagtaattttttatgtgggaccaacgccaagtaaacctggtaaagtatttgggagtggaggacctacaacgtctgggagaatggatgcttttgcaccaacaatgatcaagttaggattacgttcgatgattggtaagggatatcgtcagcaggcagttaaagatgcaatcattaaatatcatggagtgtattttggtgctatcggtggagccggagcgatgatgtctaattgcattaaagaatgtacagtaattgcttttgatgatcttggacctgaagcgattcgacgtttagaagttgaggatatgccattagtagtagtgattgatagtaatggtaacgatcaatatgaattagggcgtaacgattatttaagtacatgtaaataaagagaaagtattaaagaggtaatataataatgtttaaaaagaaaagagattatggatattacagcagttatggaacaagtagtcgaagtcgccttaaggttggacgcgttgctcttgttggggctgttggggttgtcttagttattggaattgttgttgtgttaaatttgacacggattaaattattaatcaagggctattcattttcacaagcaagtgaaattttgtcattaacaaaagaacaagaaaatgaaattttatcccatgataaacttaatcatattactaattggatagcaaattctaaaaaagtttctttatatgatgaatacgaaaaatatctaggcatgaataaaaagatggaatatgctgatgttgttacatatattaatggattatttaaagaagaagtacctaaactaaaaagtatggggtatagtgagaaagttatttggaatttgattagtgataaagtatcaaaagaagatttacaatatttgatcgatcataattatactgccaaggatttagagccttatcgcaaagtaaaaggttatcaaattcaaaatcttgaagcgtatatcaacgcttataataattacaaagactataattatgcagtatgtattactaactatccatttttgatttcatctaatggtgagcctaaagaaagctatacaattactaatcctgatgatttattagttttagtaaaaaaaggtttctatttaccagaaagctatgaacctaaattagtagatccggaaattccagtagctccagattgtcaaaatccgaaaatgactaaagaaacatcagatgctttaactaaaatgtatgaagcagctaaaaaagaagggttagaattagttgttaatagtgcgtatcgttcatatcagacacaagttgatacaatggctgattttgaaagacgttttggcgggcagtatgcaaatgaatatgtcgctcagcctggagcaagtgaacatcaaactggtttaggaattgatttaactagtcaaagtgttgtagaaggtaaaaaaatcacttttggtgatactgatgaatataaatgggtaattaaaaattgtgctaaatatggctttattatccgttttgaaaatggtactgacggaataacgggaattgctcatgagccttggcatttacgttatgttggtaaagatgtagcaaaaaaaatcgttgaaaaggaatggacttttgaagaatattgtttatataacaatgtaatgccaaaagttacgaaaaaataatctaggggttacctctagattattttaatgaggtaaagaaatgaaaacattaattactactttaaattcaaaatatatacataagtctttatcgttaagattgctttatgtagctactaaagaatatcatgaggtggattttaaagaatatacgatcaaagaggatcttgatacaattgcaaatgatattattgaacaaaaagtacaggttgtggcttttagtgtctatatttggaatgttgatttaataaaaatattgatagataaattaaaaaaaatggacccacaattagttattgtaattggaggaccggaagtaagttatgaaattgattattttctagataactttaaaattgactatttaattagtggtgaaggtgaggtggcttttaaagaactgttagattgtttagaaacacagcagccgattaatattcaaggaattagcagaaaagataagcgagattatcaacaaactaagccggttgatctacaatatcttgaaacacttgaatcaccttatttattaaaacgtgatcttgctgatatggataagcggattctttattttgaaacaagtcgcggctgtccatatcaatgccagtactgtttatcttcattagaaaaaggattacgcttctttagtttagattatttaaaagcgcaattatcattattgcttgatagtggagttaagacaattaagctgctagatcggagctttaatgctaaaacagctcatgctttggcgattttagaatttatttttaagcattatcgaccaggaattcaatttcaattcgaaattaatggtgatgtactagatcagcgaattattgattatattaatgattatgctccaagaggattattacgatttgaaataggaattcagtcaacatatgagccgacaaatgaaatcgttaaaagatatcaaaattttgaacggttaagtgaggtaattaaacagttacagcaaaatcataaaattgattttcatttagatttgattgcaggtttgcctttagaaaacctagagagatttgcccgatcatttgatgatgtttttgctttttatccaaaggaactgcaattaggttttttaaagttattgagaggaacaagtcttcgaaaagaggcagaaaaatatgggtatgtatatgatgaaaatccaccctatgaattgctttatagtaatgatttaagccctgaagatattgggaaaattcatttggcagaagaaatgttagagaaattctggaatagtggcaagatgccaataacaatgaatacagtgataagaacagtcgcttcacctttttattttttcttagacctgggcaattattatttgaaacaacaatttaaaatgtttaaatttcaaaatgatgaattatttagttatttagacgaatatttaaatcggcagtatcaggatttattgattgaagactatttacggttatcaaaaataaaacctaaacgctggtggaaggcccgtttagataaaagcgaagcacgtgaaacaatgcattatttgatagaaaaatatgacttagaccaagaagaagtctttagatatggggtggttgaaaaggtaactgatggctacttattagcgatttatcaaaattatcaggttagtgtgaaaaagtattcttgataatgataaacggttatattacgttagataacgttttcctgtaatgggagagcgttttattttatgattataaaaagggctgggtaaaggagtatataacatgaattaaaaatacaaataagatatacttaatagtgcatggagggatatagaatgatagaaaatattcgtaagagagatgggcgcctagtcgcatttgagttagataagattgcaggagctatatacaaagcatttgaagcaagtggtggtaaatatgaattaaaaaatgccatgaatattgctaaaacagttgaaacaaagctagaaaaaaagaagagtgaattaccaacggtagaattagttcaagatacggttgaagaagtgttgattgaacaaggatatgtacgagtggctaaagcctatattttatatcgcgctaatcgtacgcgtgaaagggatatgaagtcacggctaatgaagacttttgaagagattacttttgctgatagtaaagatagtgatctaaaaagagaaaatgctaacgtgaatgcagatgctccgatggggacaatgctgaaatatggagctgaagcagcaaaacagtttaatgagatgtttgtattaaatcctaaacatgcacgtgctcatattaatggggatatacatattcatgatatggattttttaactttaacaacaacttgttgtcaaattgatttaattaaattatttgcaggaggattttcaactggccatggagttttaagagagccaaatagcattagtatctatgctgctctagcttgcattgctatccagtcaaaccaaaatgatcaacatggaggtcaggcaattcctaattttgattatagtatggcaccaggtgttgcaaaatcatacttaaagcatttttatcataatttagctaaagcaattactttattagtaaaattagatggtgaagatattgcgactaaagtaaagggagaaatgcgtttaaaacctactttagataaaaatgaggcatttgaagaacaattaaaagaaacactgaaagctaataaagtagataaatttgtagatgaaatcgttgaatttgcaattacaagcgcttatgaagaaactgatcgagagacatatcaagcgatggaggcgtttattcacaatcttaatactatgcattcaagagctggagcacaagtaccgtttagttcaatcaattatggtatggatacttcaagtgaagggcgcatggtaatgcgtaatatattattagcaacagaagctgggctaggtcatggtgaaacaccaatttttccaattcaaatatttagagtaaaagaaggaatcaactataatgaaggtgagcctaattacgatctttttaaattagcttgtcgtacctctgcaaaacgtttattccctaatttttcatttgttgatgctcctttcaataaacaatattataaaggaacgccagaaactgaaattgcttatatgggatgtcgaacacgagttatgggaaatgtttatgctccggacaaagaaattagttttgggcgtggaaatttaagttttacttctatcaatttaccaagattggcaattcgttctaaaggagatgtaaatgagttttttgataagcttgatggaatgttagatttatgtattgagcaattgttagaacgttttgaaattcaatgtcgtcgtaaggctaaaaactatccttttttaatggagcagggagtttggcttgatagtgatgaattaaaacctgatgatgaagttcgtgaggttttaaaacatggaactttaacagtcggatttatcggattagcggaaacattaaaagctttgattggggtacatcatggtgaaagtgaaaaagctcagatcttaggattacaaattgttgctcatatgcgcaaggcaatggataaagcaactgaaaaatataatttgaattttagtttgattgctactccggcagaaggactttcaggtcgttttgttaaaatggataaaaaactttttggagaattagacgggattactgatcgtgaatattatactaatagtttccatattcctgtatattatccaattagtgcttttaagaaaataaaattagaaggaccatatcatgaattaactaatggtggtcatattagttatgtcgagatggatggggatccgactaaaaatattgctgcattcgaaaaaattgttagagcaatgcatgataatggaattggttatggagcaatcaatcatccagttgatcgtgatccagtatgtggttataatggaattattgatgatgtttgcccgttatgtggaagaagcgaggaagaacatcatggttttgaacgaatccggcgaatcactggttatttagtaggaacattagatcgttttaatgatgggaaaaaggctgaagaaagtgatcgtgtaaaacacgaaaccaaggaatgaataattaatggaaattagattatttggtacggttaatgattctattgttgatgggccgggcttaagatatgcgatttttacccaaggttgttttcataattgtttaggctgccacaatcctaaaagccatgatattaatggcgggtatattagagatactagtgaaataattaatgaaattgatgaaaatcctttattagatggaatcacgttatcaggtggtgaaccaatgttacaaatcgagcctttaaaagaactttgtaaagctgctcgacttagaaaactaaatattgttatttatagtggttttacattcgaacaaattatggatgatcctaataaaaaatcattattggaactttgcgatatgctaatcgatggcaaatttgaattagataaaaaaagtttagctttactttatcgtggttcatctaatcaaagattgattaatattcaacaatctctaagccaaggagaggtagttgaatatttggctgatgagaataatgaaattaagatttaaggaagcacagcttccttttttgttttaaagattggtgattagtttataaagcaaataaaaaggcactatgcaagtgtgcctttagactatacttatttaattaataagttagcttgtaaccaagctctctcttcatttgttaaaaatggtgcaacatgatcaaatactaattgttgataatcattgatttgtttgatttcatgattagataataattcaagatctaaaccatctaaatcaaatggaaccattgtaattggttcaaattttaggaactgaccatattcattagtttcgacttcaacacataacaattcattttcatgacgaacaccatgactattttcgatataaataccaggttcatctgttgtgatcattcctggttcaaaagcacacattttagcaaatcctggacgatcatggggtctgaatccatttggtccttcatggacgtttaagaagtgaccaactccatgtcctgttccgcagcgataatcaagattgtattcataaactataccacgtgctaataaatctaggtttggtccagttgttcccgctaagaaatgagctgcttgtagtctaaacattgcttttaaagccacggtaaaatcacgtctttcaatatcactgataggacctaaaacaaaggttcttgttgtatcgatcgttccatctaaatattgaccaccagaatcgattaatagcattccctcattagttacttttgcacaatttctaggttctgctttgtagtgcatcaaagcagcgttagctttgtatccgcaaatagtatcaaaacttagatcaaaaaattcattttgttcttttctaaatgctgctaatttatcagagatggtaacttcatctaattcgatttttccaacgttgttttttaaccaatacatgaatttagtcatagcgacaccatccttgatatgggcatttttggttgctttgatttcagtttcattttttatcgctttaaaatgttgagttggattaggtgctgtttttatttcacaatttagattattgaagatttgataattaacaatttgatcatctaataagatttttccagttagttttttaacatcttcataaatatcattataagctctgatgataatactatccctttttaaaatagcttcagttttaacatcaacgacgttatcttgaacatatagaatagcattatcttgattaatcaaagcataagatagtacgacgggattacaatctacatcgttaccacgaatgttaaataaccagacaatatcatctaagctagtaataatatggtgttggcaatctcccatggcactgcgcaaacgtgcaagttttgaagcacgtgattcaccgcaatattcttcatcataaataaaagctggctcatgagagatgctagggcgttcactccaaacttcatcaactaagtcaacatctgtaattagtttattacttaaacgagcaacttcttgatatgacattactcgtccatcaaaaccaacagtcttatcagtgttttgatcaagatattctttgattgttggaaccccaggcatagccattttcattaaaataatgccacttccagctaattgttgttctgcttggataaaataacgcccgtcagtccataaacgtgcttcatctagactgattactaatgttccagcagaaccggtaaatcctgataagaatttacgtcctctaaaatattcaccaacatattcactttgatgaaaatcactagttggaatgatataaatatcaattccattttctttcattaatgtttgcatttttgcaatattttcttttatcatattcataacctcactaacaatactttatcacaactgattagctccctcaatgaatataaaaaaaataaaaaaaaaacttacacaaataaattttttatgctaggatagcattgcattaaaagaatattactaaataatggtagtgatgattaagtcagctgacaaagattgtagcgaaagttatggttttgttaactggcttttttatgttaaaaggaggaaaaattaatgccaacaaatagaaaagaaagtttagtttttacaatgtttatgtgtgcctttatggttttttggatgagtgtctataatgtcagtttacacttcggcttttcaagcgaagcaatcaaagaagcatggttgggattcccattagcctatttatttgcaattttatgtgattgggtaatagtatctaagtttgctaaaagtttagcttttaaagttgtaaatcctaaaagtaaaccacttattaagattattatgatctcgttttttatggtctgtggcatggttattttaatgtctttatacggtgcagttgaacaagctggaatcagtgaacagactttaatggtgtggttgacaaatattccaaaaaattttattgcagctttaccactacaactgttaattgcaggaccttttattcgaagcgttttcaaaatcttgtttactagacaaatcgcatagattgtctagtgattttatcaaacttagcgctataattatcatgttaaaaaagcatgataattatttttcacgaaaaaaatataagtctttaaaaagtttgttaaatcgttgtaaacccttgtcagactagggatacagcgaaaatgactatttttttcaattgatagattattatcgttgcatttttaaaatataggagtatacttatctcaggcaaagggggcttatactatggatgatgtaattcaaaggttagtagaaatagaccgtaaatgtgtcgaacgtgttgaagctgcaaaagctaagaaattagatgcgcaaaccaacatgaatgaaaaaagaaaagagatatatgatggttttgtcaccgaacaaaacaaaaagattgaggcgcataaagctgaattaatgaataaaaacaaagaagaagcaaagcagcttgatcaagattataatgatactgtagctaatttagagaatctttataatcaaaataaggacaaatggatcaatcagattgtcgaaagatgtttaaagtaagaaggtgaaggtatggctttatcgtcaaatgcactatgtgctaaggctaaagcgatgtatggataccgcattggtgaggaaggttatagtgatctatgccggaaacagtcacttagtgagatggtaacatacttaaaatcgcaaacaaagtatagtggtgttttagaagatattaatgtccgtaacgttcaccgtcgccaagtagaggctgctttaaataaagaatactttgaacgttgtgcgagattaatgaagtatgcaccaaaaaagaatcaagatttctatagccaagaggtcattggaattgaggttcaattgattgttgataaggttgtcagtattaaagaaaaagatcaagcgagtttttctttggagatacctgattatttagcaagcaaaatgagtttcaatatttatggattgatcaatgttgataactataaggatctagtaacatatttaagagatactaggtattataaaatattagctgattttgattttacagcaccgattgatattaatgctttagaacgtcagatgaaatcactattttatagtacttatgtggcagccattaaaaagaattttaagggtaaagaacaaaaagaattattagatattttatcgacatcgattgagttgatcaatattacgaagatctatcgattcaaaaaatattttaaagaatcgaatgaaacaattaaaaattctttatatttagagcattgtcgaatgtcttcatcaatgttggatacattaattgaagctcgtagtgcaaaagaattgatggaattattagctaattctaaatataagctgtatttaggtgataaagactatgcttatatcgaatattatgttgaagaagttagatataatatcgctaaaagatatatgcgtttttctagtaacgcaccgttagtatatttaacatattcaatcttacaaaaggtagaggttgataatctaaaacatattattgagggaattagatatggacgagatgcatctagtattgaagagatgctgatctttgcataggagggattaatgaatggctattataaaaacacatttctttaatatttcctttgaacataaagatttgatgaaaatgctaattaagatgaccgagtatcaagatgaaatgtttcctcaagattctaaaaaaatagcaaataatgttaaaggggtatcagttatggatgaagctaatccgtataatgaaccactagataacatttatcacatcttaaatcgtttaaatcttgaaagtaatgttcaagataatgaatttaaagaaatcaacttgcataatgcaaataaattaatagatgatattaatgataaaattgataatattgtcaaaattaaagaagatattacaaaagaaaaagaagaaaatgatgaagcaatcattttgttgaaaaatctagaagaatcaaaaataagtgttgatgatgttaagaatactaaatatattacctgtcgatttggaaagattcctgtgaatgaatttacaaaaattcaatattatcgtgattatgaatttatttttagggaattgaatcgttctaaacaatatgtttggatcgtttatgctggacttacaagcagtatttctgaaattgataatgcattttcatcaatgtcatttgagccaattagcttaccggagtttgctcatggtaaagttcatgaagcaattgacgaattaactgaagagtcaacagctatggaacaatatattgctaaaatggattctaaactagaggatataaaaaaggaatataaagaagaggttttagaaacatttacaagattatataacttaaaaagactatttgataaatgtcgttatgttgtggacttttcacaaaaagcttcgatctacactttcagtagttttgatttaaaagaagctgaagcaaaatttgatgatattgatagtgtaaaagttatggaactaccagttaatatctatgaaaatagaaatattgtggcaccagtattagtaagaaataatagtttaatgcaaccgtttgaaaatgtcttgagtgtaacacttggtgacacttttgatccaacgacgatagttgctttattaacgatgcttatcggtgctgtttgtgttggtgatattggtgttggagctttattaattgtattagggttcttatttacaattaaaaaacctaataattttggtggcatgttaaaacgtttaggagctgctgttttaattggtggtttattttatggaacggcgttttatcgaattgaattgtaccagccgttagcaagtttaccattacatgttattcatactttcttatttggattcagtctttggatcattgcgatggtgattttaattattgtgaaaaaagttacgcgaaaatcaatcaagatatagaggagggatataatggcgatttcaagattaaacttagttagtattaattttgataagtatcgttacaatgaagttttattaaagctttttagccatgatgactttcatcctgagttggcctctaagtttattgatagtgtaacgggactaagtgtttacaatcaagataatctttatgaagaaatcttggtgcgattgaatgatgcatcaaataagtatcattttaagctagaagaagtgccagttgaaactaatcaaatcaatgtgctgcgggtaaaagaatatttagatgatctactgcttgatgttgagcgaattgatgctgtaaaagtacaattagatcggatgattattgaaaatcaggaagcaatcattcagttacaacatgttgctgatattgatgttgattttgatgatttgtttagctgtaaatatcttcaggttagatttggaaaaattccagtaaataatgtttctaaattagattattatgaatcattaccatttgtctttaaagcatttcacaatgataatcaatatacttggtgtatgtatattacaacgcctggtgatgcaccagaagttgataatattttctcatcattgtattttgaacggattcatattccggcctttgttcacggttcaccagaacttgctattggtgagattcaagaagaagctgatgttgctaaagaacaaagtgaaaaattaaaagagcgaattgataaaatgtttgctaatgaccgtgataagttgaatgaaatctatacgattgcaaaacatttaaatgatgtctttatcatgcaaaaatatgttgttgtaatcggtgataaactttctgtcaatggttttgttccaacacgtagtgttaaaaaattcaaagaagattttgaaacattagagaaagtaacagttgatattaaaccagctaatagtgatgttcgtttatcgccaccaacattgcttaaaaataattggttttcacggccgtttagaatgttcgtcgaaatgtatggggtacctaaatataatgatgccgatccaactttattagtggcattatcatataccttgttattcggaattatgtttggtgacgtaggacaaggggttattttatcacttgttggatttgtggcttataaaaagtttggtttacaattaggtgcggttggagtccgtttaggaatttccagtatgctttttggggttgtctttggttcggtatttggaaatgaggaaattttgattccgttattcaatgcaatgtcgccagacaacacgatgacattattgatcgctgcgatttgtttaggaataattttaattattatttcgatggcgtttaatgttattttgagttttaaaaagaagaattttggagaagcagtgctaagtcaaaatggaatttgtggattagtcttttatatttctattttgggattagttataaatatgtttttaggattaggatttgttaatgttatttatgtagttggattgattgcattaccactatttctaattttcctaaaggaaccactaattagaaaatttgaagaacatgaagcaatgttcccaaatggttttggtgcgttctttgttgaaggattcttcgaattattcgaagtagtcttatctttcatcactaacacaatgtcatttttacgggttggaggatttgttttatcacatgccggaatgatgttggttgtatatacattggctgaaatggtcggtggcgttggtgagctagccgttataatttttggtaacatttttgtaatgtgcttagaaggattaattgtcggaattcaagttttacggttagagttctacgaaatgtttagtagatactacgaaggaaacggaatttcatttaaaactattaaagaggattaaaaatcgaggaggaagtcattatgacagttttagaatttattttaccagcattagtagttatcttattatcattaccattaattaaagtattcacaggaaaagtaagcgtaaaaagcgctaaaattagattagcaactcatgttgctggatttgctggagcagtatgtttagcattatatttggctgctgtaactaacggtgtatacgctgaagaaacagctgtaattactggaacaattgctcaaggtttaggtttcgtagctgctgctttagctactggtttatcagctttaggagctgggatcgctgttgctgctgctgctcctgcggctatcggagcattttctgaaaatgaaaagaactttggtaaatcattaattttcgtagccttaggtgaaggggttgctatttacgggttattaatttctatcttaattatcaacaaaatctaattgaaagaatgtgatcattatgcgattttattgtataagtgataacgtcgatacccaagtaggacttagattagtaggaattgaaggccaagtagttcataaaagaagagagtttcttgaattactagaaacaaaattaaaagatgattcgatcggaatcatcttgatcactactaacttaattgaacttgcgcctgatgttatctcagaaatcaagttaaaacaacaaaaaccattgcttgttgaaataccagaccgtcatggtgaatcaaaaattggtgaaacgattgacaaatatgtttcagaagcaattggtgtgaagttatagaaggggaatgctatggaaaagaaagaacaagtatttctttatatgaaagaagagattgaaagattagcaaatcttgaagaagaaaaaatcttagatgaagcaaagcgtcttgaagaagaagcatacaaccaaattaaagctgaagctaagaaagatgccgaagcattacttgctaaagagttagtagaaatttcttcaaatgctagtgttgaagcttcttcatcacaagaagaaaagactaagaagttagttgaaaaaagagatgaatatgtagctaatatctttagtgaagctaaagataaattagttgcttttgcaaatagcaaagattatcaggcgtatctagttaaacatatggaagaaattgggaaattatatccaatgagtgattcaactcttgaacttagagaagctgatatgaaatataaagatgaattgattaaagcttatggtacagctttagaagtagaagtaagtgataagattacgattggtggatttattgttaaaaataaagctactaatgtcgttgttgatgaatcattagactttgctttagaaaaccaaaaggattggttctataaaacatcaggattaatgattaaatagacagggggttaatatatgaacaataatgtaatttattctattaacggacccgttgtaaaagtaaaagatacagtgtctttttccatgttggaaatggtatatgtaggtaatgattcattaatgggtgaggtaatttcaatttctaaagaatttactaccatccaagtatatgaaactactactggtcttaagccaggtgaaccagttgtttcaactggttcgccaatctgtgcaacgttaggcccaggaattttaagaaatatctttgacgggattgaacgtccactaaaagcccttgaaaaagaatcaggagcatttatccaagccggaagcaatgttgattctttagatattgctaaaaagtgggatgttacaatgactgttaaagttggcgatgaagtcaaaggtggaactatttatgcaacaacacctgaaactgatttaatcgttcataaatgtatggttagtccattgattagtggtaaagtggttgaagtggttgaagatggtcaatatacaatcaatgatgtggtcatgaaaattgaagatgctcatggtaagatcattgaatgtacattatgccaaaaatggccaattaaacaatcacgcccagtcacaaaacgattaccaattggaacacctctagtaactggtcaacgggttatcgatacgctgttcccgattgctaaaggaggaacagctgctattccaggtggtttcggtacaggtaaaacaatgacccaacaccaaattgctaaatggtgcgatgcagacattatcgtttatgttgggtgcggtgaacgtggaaatgaaatgactcaagttcttgaagaatttagtgaattgatcgaccctaagagtggtaaaccacttactgaccgtacggttttaattgccaatacatcaaacatgccagttgcggcacgtgaagcaagtatttatactggagttactttagcagaatattatcgtgatatgggttatcatgttgctattatggctgattcaacatctcgttgggctgaagcacttcgtgaaatttctggtcgtctagaagaaatgcctgctgaagaagggttcccagcttatttaccatctcgtttatcacaattctatgaacgggctggatatatggaaacattaaatggacaagaaggttcagtatcaattatcggagcagtctcacctcaaggggcagacttctcagaaccagttactcaaaatactaaacgtttcgtacgttgtttctgggcattagacaaagctctagcttatgctcgtcactattttgcaattaactggacacaaagttatagtgattatgtctatgatcttgaaaagtggtatagtaaaaatgttgggcctaaatttgtaagtgatcgtcaagaaattgcttatatcttagcagaagaagcaaaattgaacgaaattgttcaattaatgggtcctgatgtattgccagaagatcaaaaattaattattgaggttgcaaaggtagttcgagttggatatttgcaacaaaatgcgttccataaagatgacacttatgtaccaatggaaaaacaattaaaaatgatggaagtaattttatatttaaataaacgttgtaaagaagcggtaaatcaaggtaaagtcgtaagacgtatcgtagatactggaatctttgatcaagttattaaaatgaaatatgatattccaaatgataatattgcaaaattagatacttattatcatgatattgatgaagcaatcaaatctgtagcgtaggaggaaaatgattatgtcattacaatatgtaggcttaaatgaaataaatgggccattagtcgttttagaccacgttaagggtgcttcatacgatgaaatggttgatattcaactaaaagatggaacaactcgagctggtcgaattgttcaaatcgaaggtgaaaaagttgttgttcaagtatttgagggaacaaatggcttgtcacttgaaaatacaaaaacaaggttattaggtaaaccgatggaattaccagtttctaaagaaattcttggaagaattttctctggtgctggtcgcccaattgatggtttaggtgaagtatatgctgaagctgaaatggatatcaatggattgccattaaaccctgtatcacgggtatatccacgtaactatattaatactggaatttcttcaattgactgtttaacgacattgattcgtggacagaagctaccaattttctcagtatctggtttaccacatgaccgtttagcagttcaaattgtaaaacaagcgaaaattgctgatgaggcgggtaaaggatttgctgttgtttttgcagctatgggggtaactaatgacgtagctgaatactttaaacgtagttttaaagaagctggggttatggaaagagtagtcatgttcttaaatctttcaaatgatccaattattgaacgtattttaacgccacgttgtgctttaacggctgctgaatacttagcatttaaacaaaatatgcatgttttagtaatttataccgatgttacttcttattgtgaagctttacgtgaattttcttcaagtaagggtgaaattcctggtcgtaaaggatatcctggatatctatattctgacttggcttcattatatgaaagagcaggaatcatcaaagatgctgaaggttcagtaacccaaattccaattctaacaatgcctaataatgatattactcatccagtacctgacttaacaggatatattactgaagggcaaatcactttagatgttgatttaaactcagctggagtttatcctccagtaggagtattaccttcattaagtcgtttaatgaaagatggaatcggtgaagggtttactcgtgcagatcatcaagatatcgcaaaccaattatttgcatgctatgcccatgttcaagatgttcgttcattgacatcagttattggtgaagatgaattatcagatatggataaaaaatacattagctttggtcgtttatttgaagaatactttattaaccaaggttttgatactaaccgtagtattgaagaaacattagatttaggatgggatctagtttcagttcttcctcgtgaggccttagaccgtttagataatgctctgttagatcaatactataatcatgaaaaagcggttgaacgctttaacattaaagaaaagaagattattaaagaattacaagaagaaggtgaataatcatggccttgaaagtagttccaactaaaggtaatctaattgcaatgaaaaaatcattgcaattagcgaaccttggatataatctaatggatcaaaaacgtaacgttttaatcaaagaaatgatgactttattagatgatgtaaaacttattcgtgatcaaattacttcttcatatcaagaagcatatgatgcacttcaagaggctaatatttcaatggggttaattacagatattgttaatagtacacctgaggattatgggatttcaattgcttatcgaagtgttatgggggttgagattcctaagattgcttatgataaacaacccttaaagatgacttatgatattgaacgttcaaattcaaaagtcgattatgcttataattgtttttacaacgtaaaacaattaacagttttattagcagaggtagaaaatagtgtttatcgtttagctaatacgattcgtaaaacccaaaaacgtgctaacgctttaagaaatatttcgattccgcgcttcgaatcaactattaaggttatttcagaagcgttggaagaaaaagaaagagaagaatttacacgtcaaaaagttattaaagaaatgaaaaaatagaagctatgcttctatttttaacatttaataaatttaatttgttcattttttaaagaatattcgagattagctggtagtttagaacgaatatgaattagtttattatcagcaatagtaccattccatgttgctacaacaattatttttttagctaattcttttaaaaatgttaacatatcgatatttgagtccttagcataaaggactcttttattatccaacaaaagaacttctttatcgtagttatcaataaagtcattcattacagtgatgatttcactacaatcatctttaaagatctgatcaagatttagaattggaataccggtttcattgctatagtcatgaataagttttgatttaccactcccaggaccaccgataattaaaattagtttattatcactgttttgggcggtggcgatttctgctgttaacgggttcatgggtctgtcctcctttttatattctctttaatccaaaaaaccttgttaaaatcgacttattatctattttcattctatcatttatatttgtcatttcctagcaatatcataattttactagtatttcctaggaaatattgacgatttatagtcattaagtatttctaaagtttttctaaaaaggtgtactatctattgtgatacagttaatgcgatgatataatgaaactgtactatagggaatgatacagttttgttatgaaacatgatattaaaaggagatgcttagaatgaagaaaatgcttacttttttaatcgctacgattttgattttggctatgtcgttgatgccactacaggcaattaccggcataaatagcttagttagttatggtgaaggtaatgaaattgaaggtggctgtaatgggaaaaatgttgatttaggcgaaggactaagcggattgatggtatctaatcaatcagagttagtttttattggtaacgatgattttaaaatcaaagttggtaagccggttaaagaatttgaaataattgatgatgttgataatgatggtcttaaagatgttgctgtttatattgatagtgaagatgattatgatgattttaaaatcgttagttcaaaaacttcaaaagtattatatgctacaaaatattcttataacacgattaatgataataatgaggcagtgaataagaatgccacaattagacaaattctatttaatgataatattgtctatttaatttataattatcatttagtaggaattagtacaaaagattatcaggttgtatttgattatgaagcgaaagataatatttggaaaatggcattagttaataatcaggttatttttacgacacaattaggagaattgggaagtcttaataaaactaatggaaaattaaattatacagttgcattaacaacacctaaagaaattaaagatccacgatatgatactttggggaaagtcaatttaaatatttgggatattgtgtatattaaagataaattgtatgtaactacagaagatgccaaattatatcaaattgatcaaatgaatgggaaaattattaaaacagtaaatttagaagagggtattgatgagaaattaggaaatttattaaaaaacaataataaatggagcggtcaactagttcctacaggaatccataatattagttttatgagttatcgaatggatttattagataataatttaatgttgataagtgcttacttggggagtccacaaattgaattaaatgaaggagatagtgaaaaagagatacctcatttaatacttattgatcttgaaaagatggaggttaaactggatattcctgttgagcaatataatttagattatagtagagcggttaaaggtatttttgataatcagcctgctttggttgttccaacgtatgctagtactggaaagttaagacttgtcgcttattcattaaatgatggtacagtattaaaacaaactaatttgaatcttaatggtattaatagtaaaaatgtgaaaattcattttgctaatcaaggagaacgttatttattacaagttgacgggggtgtgtcactgcttgttgatcaagatttgaaaacaatagagtacttaggtagtgctaaagttgttaataaagttgttgatcttagtgatggtacaatcgtgtctgttttgaataatggtaaaataacgcaaattaaaaaaatgggtttaggtggctgtgatgataatttagttacgtttaacattccagatggttatcataataatggttttgaagcgattaattatgatgaaaaacataatcatcttttaagtttagtcagtgaactaaacgctaatggtgaggtaattgctagtcatatcgtaattatgaatttaaatgacggaaatacgctggcagataaaaaggtattattagaaaaaggctatgatgaaaataataagtattatgaacattatttaattggtgaaacaattagatattttacagatatgaataatgatggcaaatcagaaattattgttgatgagaatattcttgatggggcatcgttaacatttagaagtgtttataataaatcatttgaaggtgctactacgattattgacgtaggtgatgtgaataatgatggaataagtgatctagtcaatattggtgaaagtgaaatgcgattatattattcgttaaagaatggttatgatataacttatcaaaaaactaatattgctaaaagttatgataaaaaattgcaaaacaatattcatgttaaagtgctaggcgatcttgatcatgatggaatcaaagattttgtaatcaatgcttataatgataaaggctgtcaatgtttccaagtcattaaggggaaagacttatcggtacgatattcattattaaaagatggtgttgtctatgaaaatgaagaagatagttttagtgtgacaggaattgattatgacaatgatggagttgatgatcttgtttatggtatttatgatgaaatgaggactgttcttagtggagcaactggtgaaaagttatttgaatacttaattactgattatcataatgattgggataattctatgggtgatccggttcctttggaaaatatagttagttttaatttaattgaaaatggaaatagtgtagttaaaatcaatgatcttaatgatgacgggattcaagagttagcgtatttagttagggattatgataattctgactatggtacaaagaatattctaaagattttaaatggaagtaattatgaggagttaaaaagtaagatccttggtaaaggaaactatgattcgagtcaaattactacagtgatcggacaatcaaaattaatctataatgatggtacattatcacaaatatatgattatagaaatgatagtttagtagcgggattaaaaatggcagtcacgagtgctcgaactttaaataatcagctattgcagcttgaagataatgtagggcagttatatagttttactgatcaacgagattttgaattagttgattttaatgaaaaagatgtaaatgatgggaatttaaaaataagttataaaacagaaaagaatggtttgatgtatgtttatgatcaaggaaatttgattgaaaagacaacagctaaaaactttaatgttaaattattagcaggagagcatgatttaatcttttcatataatgatggtcaaggaaaggttactcattatgctactgtaattacagtggaaaaaagcactattagtcgttatttgattatgttactggtaataggaattgttgctggcggctttggtttagtcttctacccaaaatatcgattaatgaaaaaggcaggtgttaaacatggataaattaattgtgattgaacatatggataaagtttttggtaattataaagcaattgatgatttgtcttttagtttagagggaggaaaaatttacggtatgattgggccgaatggagcaggaaagtcaacaactatgtcattgctgatgggcttgatttttccgaccaaagggagtggtttgatcaaagggtatccgttaggttctaatgaagcaaaggcaataatgggatattctccagaatttcctaatttttatagtgatatgagctgtttagaatatttagtctatatggggatgttgtctgatcttagctatgatgaagctttaaaacgaactaaagaattattagaagaatttgatttagttgaacatcagttgaaacgtgttgctaaattttcaacagggatgaaaaagaaagttggattgattcaagcaatgatgcataagccagagattttattactggatgaaccaaccgctaatttagatccaactagtcgttatgaaattattcaaactttaaaacgtttagtaaagcagcggaagatgacggttttaattagttcacatgttttaacggaattagaaatgatcattgatcatgttattatgatcaataaaggtcatgtagttttaaatcaacctattgatgtagttcaaaatgaatttaatcaagaaaaattacttgtaagctgtaatcataatgagcatttacaaacatatttagaaactaaagggtatttttatacgctcaataatggagttttaagagtaagtatagatgataaacaaaaatgtaaaaaagaaattgttaagtttatttatgaaaatgattatgaattagatttattaaaagaggatacgatttctctagaaggactatatcagcagttagtggaggaaaatgatcatgaaagtactattcagtaagacatttattaaaatgtttaagcttattccggttgttgcgtgtgtgattattagtggcttttttggttttatactatcaaatcaatatcttggtttaatgagtcaaaagccaacttatctttctttatcacaagatattttaatgttttatgcagttttagctttcgttttattagtaggaatgttgatctggattatttgttcgaatagtggttcgggacttttcgcaagtgaaattcacgaggggacaatgagattattattatcaaaaaaaatatcacgtttagagttagtaatcggtaaagtaggtggtatgctagtgggcagttttgtttatttggttatttcttttgcgacattcttaatggtctttattattttaagtggtgttgaaaaagatatattacggatggtattagcagctactcttgccttcattagttatggaataattttaatttttattcttgggggattagcgacttttctatcatcatgttttaaaaagaaagtacctgctattttaattctagtagcattagctgcactaatttttggaattatcccttttgcccgaattttccttacgaatactggaaaatatgatacctatcatttatatttatttgatattaattatcatctttcattgatctttaatcaatttttaatgctggttggagattttaatacaatgttaggtgatctaagcatgtttggaatgttcacaaatctttactcatatggtgtaactgattttgatttaggaaatcgtgctgtttatacattgaatcagtcactaaatagtggtttgattacagcagtttatctagccttagctagtggactgtatgttttatcttatcgccggatggataaaaaagacatttaatttagtactatataataatacaatgaatcttattatttgagtaatgtttttgactaccgcttttttagtagcaaagctgtatatccctttgaacaatagaggttcctttacggattataaaactagaagttatttacataataattttctagtttttttatgagaacttttttcaaaataagattaataaacattccgattaaaatctatgatattattaattagtaggaggattgagcgatgtatctagtatttgatattggtggaacagcaataaaatattgctggatgaacgaagcgggagaaatttttaataaacaagaaattttatcaacagcagtagacagcttagataaatttatagaaacagttgctaaaatataccacgaaagtaataggaaagttgaaggaattgctttatcatgtcccggtgttattgatgcagctaatggaacgatcaaagtcgttgttgcgtatccatatttacagggaatctgtttaactgagctaatttctaaagcttgtgataatataaaggtttctttggaaaatgatgctaagtgcgctggattggctgaagcctggattgggagtgcacaagcttatgatgatgcaataattgtagttttaggaactggaattggtggagcgattataaaaaataaacaaattcatcatggtgcacatttatttgctggtgaaataagtaccctgatcgttgattatgataaagagactaatcaagtattgacctggtcggacattgcttctacaacagctttatgtaagcgggcagcggaagctttagcagtcacgtcaattgatggaagacgtgtttttgaattggctaacaatgcggatgaagttgttctggaggtactgaaaaatttttgtctggatattgcaatacagttgtataaccttcagtatagttatgatccaggagtaatctgtattggtggaggaatttctaaacaacctctattgatcaagctgattaaagaggcggttgaaataattgctaacgagactaatcagctgcttaaaccaaatgtaacgacatgtaaattttataatgaagcaaacttaattggagcgctatcatactttcttagcataaaataatttgtttttttaccctaaaaaagtatcatattatcatcaatagtgttatagtataaaaggtgaatattggggaatgttcattcagtattcttattaaaagaaacatattgatgttaaaatgaatatggtttttaggaggatgatttatgggtgtttgtaaagttaaaaatattgtaattggtgagggtatgccaaagatatgtgtaccagttgttagcaacaatcatcaagatatcataacagacttgattagattacagtcattagatatagatttgattgaacttagaattgattatttcaatgaactgttagatcatcaaaaattaaccgaattatttaaagcaattgcttcaatggcaattaaacaaggaattattttaacttaccgaagtgttcctgaaggaggaaatggtaaattaagtaatgatgaatacatgcaattatattcaattgctcttgaaagtggagcatttgatatttatgatgttgaattatctagtggaactaataccgttattaatttaagtaatttaattcatcaaaatgataaaaaaatcattatgtctagtcatgattttactcgtactcctagtattgatacaatgttaggaaagataaaacaaatggattctttagaagctgatataattaagattgcagtgatgccagaagactatcgtgatgttttattgttattagaaacaacactaaaagctaatgagttatatgataaaccacttgttacaatgtctatgtcaagcaaaggaattgcaacaagaattttaggtgaacaatttggctcagcgatcacatttggaaaagataacaatagctctgctccaggtcaaattgaagttcatgctttaaaagaagtgttaaaagtgattcaccataataattaaggactatatgtccttttttttgcacctttttataatttacacataaaataaaataggtggttaaatgttaataaatcagaatgaattagaaaaattatgtaaatatttatatccaaaattttttgattataaagatattagcctttatgacttaaatattaagatcgacgactatttacatctaagtgcaaatttaaattattataatatagaaacaaagctgagagcaatagctcgggtaagagtcgaagataagattattattgatataaacggagttattaaatatggatttattaatttagatttaaataaagttttaaaggaaacggtcaaggatttgccatatttaacgatcaatgatgaaagtattattattgataatgagtacgttcgggagatatctttaaaagatgaatatataaatatagaactaaaataatcgtaagattattctagttctatttcaacatgataaatccgaccccagagataaatctgatagaaatatgctaataattgaggaccagtcatcagttgaccaaaccatggatatttaaaggattctccgccactattaattaaatcaattaatttatcacggttaaataaacgtagaagtagattattttcatcatttaatgattcttttaacaattctacgattaaatcacgatataatggtgaatgggttttaggataaggattcttttttcgattatagatatcacttggtagaaaatctttaaaagcatctcgtaatagacctttttcaatatcattgtgatacatatattcccatggcacattatataaatatgaaacaatatctttattagcgaaaggaactcgtaattcaatagaactacgcatcgtttgactatcagaacgagtcaataaagtctgcataaaccattccatatttaaatagatcattttacgcttattagcatcttcataagtatgatcatgataatcaatttcgtttaatgtttgatgatacttatccatgacatagtttttgatattcagtgcttgaatttcatcagagaatagttccattcgtttatctaaatcacgcatccatggaaagccgtcaatactgtaaagttcttttcgataaaaccatgggtagccaccaaaaatttcatccgcacattctccggaaagtacaactttatgattatgagaaatttcttttgaaaataataagaaacttgaatcaatatctgccatcccaggagcatcacgcgcaatcaatgattcttttaacgacatcactaattgtttttgggataaagttactgttttatgtttggtgttatacagtgtttttacttcatcgatatagtggtcgtcacgtgttgtttgatactcataaggctggaagtatttgtcttgatcttgatagtcgacactataagttgataatttggaaatatattggctagtaacaccagtgatgatcgaagaatcaaggccgccagatagcatgcatgatacagggacatcgctcaacaactgttggcgaatactatgatttacgagacagcggatatcatgaactgtttcttcgtaactccgattatgattacgtcgctcaagtgcccaataacgattgatttctttgtaaccgttaaagacattcatataatgtgctggtcgaagactatagatatctttataaatagttttaccaggcgaaacacttggccctagtcctaataattctttaagtcctgtttcatcaacgacacaacgccctaaatacattaaaatacattttatttcactactaaaaataaataaatcatctttttgataataataaagcggtttgacaccaagttgatcacgagccacaaaaagtttattttgatatgaaattacaaaagagaaaattccatcaaataaattaagacaacgtggaccgtaagcaataaaactagcaacaactacctcggtatcactttgactagtaaaatggtacccttcatcaattaattgctctttgatcgtattcatattgtaaatctcaccattatatacaatcgtatactcaatatcattataagtatatttaaatggttgtttaccgccatttaagtcaataattgataaccgacaatggcctaataaaacatgttcactactggcgatattaaaatcatcaggtccacgatattttaataatgtaagcatcttattaaagttttgaacttgattagttaaatcgttcatatagtcatacatacataaaaatccacacaaattaatcaccccgtatcattatatgaatgatactttttattatgtcaaaagataattttaaccgtgttttctttttttgattctccataaaaatgcgaaaaattaggtatatcaagggttttgcactagcgtgaaaaatcacggtgaatgtgataaataatagaaaatatcaccttgtctctaactttggtcaaagtattgtgtaacggctttcaaattgatacgatgtatgtgtcaagagaaaagggaggacaaaatatgttgcaaaaaattcaacgttttggtggggcaatgttcacgccggtactgttatttgcttttgcaggaacaactatcgggattggaacattgtttacaactgaagcaattatgggtggtctagctgaccctaatggattgtggtatcaagtatggaatgtcattcttcaagggggatggacagtattcaatcagttaccattaatcttcgtggttggattaccaatcggtcttgcgaaaaaacaacaagcaagatgttgtatggaagcgttagtactttatctaacatttcaatatttcttaagtacgatcttaagccaatggggaggaactttcggagttgacttcgcagcagaaactggaggtacaagtggtcttacgatgattgctagtattaaaactctagatatggggatgatcggagcgttaatgatttcatgtatcgttgtatatttacacaataaattctttgatactgaattacctgaatggttaggaacattcagtggttcatcattcgtagtaattgttggtttctttgctttattaccagttgcatttttatctgcatggttatggccaatcgttcaagatggtatgcgtgcattccaaggatttgttgctggtgctggatcaatcggggtatggatctttatcttcatggaacgtatcttaattccatttggattacatcatttaatgtatttcccattcttctacgattcagtaattatcaacggtggagtttattcagcttgggcaacagctttaccagatttagcggcttcaagtgattctttaaaatcattagcaccttgggcatggccaacacttacaggtttatctaaagtatttggatgtccaggtatcgcactagcattttatgcgacagcgaaagataagaagaaaaaacaaattgctggtctattaattccaatcacattaacagctattgtttgtggaattacagagccaattgaatttacattcttatttattgcaccagtattgtttgtagtacatgcagtattagctgctactttagctacagtagcaaatgcgctaggtgttgttggggtattatcaggtggtttgatcgaaatgtcagcccttaactttataccattaatggcttcacactggcaaacatatttaacattattagtagtaggtttagtctttacaggtatttatttcgttgtatttagattcttgattttaaaatttgacttcaagacacctggtcgtgaagatgatgaagaagaaattaaattccacactaaagctgattttaaagaaaaacaagctggtggaaaggtagaaaaacaaagtttagctgctgctatccttgaaggattaggtggtaaagataacattgttgatgttactaactgtgcaactcgtttaagagttaatgtaaaagatgaaaaattagttcaatctgatagctattttaaatcaattggtactcatggtttaaaagctactaagacaaatattcaagtaattgttggattaaaagtaccaagtgtaagagaagattttgaagcattactataaataaatgaaaaggatggtcttgaagatggcaaaaagaattaatgaaaagaagttaaaaagattagatcgatattatatgatcgctaaagtgttcttaatggttacaccgtttattgcttatctatatttatcgttgttagcgatgatgcgttcaattactttgccagaagtgctgagcagtgagccaagtgtagcagtaattttcttgattgcaatgattaatccatatattgcttatttactaaatattgcacaaagaaaattaaaagaaggtgacattaaatttgcttgtattaacttcgtattattgcttttagctcaggccttaacattaaatagtttatattttatgattattgcttacttgttctatgtaacagttaaaacatatgatattaaagtattcaagacccttaaggaatttacaatgaagtacactttccagtatggtggaggaagcttcattgtagtagccttttcaaccgtttgtttatttgcgacgcttagattaatgtaaaacagaggagaaaaagaaaatggaaaagaaatattcagttgttattgctggtggtggaagtactttcacacctgggatttgtttattattgttagatcatatggatcgttttccaattagaaaaattaaattttatgataattttgcggaacgtcaagaaaccatcgctaaagcctgtgaaatttatttaaaagaaaatgcaccagaagttgagttcgcttatactactgatccagaagaagcttttactgatgttgacttcgttatgtgtcatattcgtgttggattatatgcaatgcgtgaaaaagatgaaaagattccaatgaaatataatgttgttggtcaggagacttgtggtcctggtggaattgcttatggcatgcgttctattggcggggttattgaaattctggattacatggaaaaatattctccaaatgcctggatgttaaattattctaatccagctgccatcgtagctgaagcaacaagaagattacgtcctgattctaagatcttaaatatctgtgacatgccaatcgatcttgaagaaaagatggctaacatggtagggttaaagtcacgtaaagagatgtctgttggatattatggattaaaccactttggatggtggcataaaattgaagataaagacggtaatgacttaatgccggaaatcaagaagcatatggcagctaatggttttgcagatgcactgtcaggaacgaatcagcacgtggaacaaagctggattgaaacattcgcaaaagcaaaagatgtttatgcattagatccagaaacaatcccaaacacatatttaaaatattatttatatcctgattatgtagtagaacatactaatccggaacatacacgggcaaatgaagtaatggagcatcgagaaaagaatatctttacagcttgtagaaagatcatcgaaaaaggaacagctgtagacggagggtttgaaccagatgcgcatgctgaatatattgttgacttagcttgtgcaattgctaaaaacactaaagaaaaaatgttattgatcgtaccgaatgaaggagcagtagaaaactttgaccgtacggcaatggtagagattccatgtattgtaggaagcaacggatatgaaagaatctgtcagggatcaattccacaattccaaaagggattaatggaacaacaagtatcagtagagaaattagtagtagatgcatggataacaggaagctatcaaaaattatggcaagcaatcacattatcaaaaacagtaccaagtgcaagagtagcgaaattaatcttagatgatttaattgaagcgaataaagatttctggcctgaattgaaataagatgttaaaactatttaaaaagaaagaaaaacaaaataaagtactatcttcaatggctaacggaaaaagtgtagccattgaagatgtaccagatgaagttttttcaacaaaaatgatgggtgatggaattgctgtaattccagatgatggtaaaatttatgcgccatgtaatgggaaaatctcaatggtgatggataatacgaaacatgctttggggattgaaaccgaagatggtatggagttattaattcatgttggcttagacactgttaatttaatgggtgagggttttgccactcatgtatctgccggtgacagtgtagaaactggtgaattattaatttcttatgataaaacagattttgtgactaaaggaatcaatgatataacaatgttagttattgttgaaaatggtggtcatgaaatcacaaaatataatattaatgaaaatgttcatatagtagaatctcctttaatcgaatacaaataaaatcacatcaaattgatgtggtttttctttactgtgataaatttttttctaatttagttattgattttgttttacttaaaatattgttataataatacatgtagaggtatgatatgaaattagaagaactagttaataggaattatcaacaacttaatgataatgatttatatatatggaattatattattcatcatcgtaaagagtgtgagcgtttatcgattgatgaactagctttaagatgtagtgtttcacgaagtactattttacgcttttctaagcgtctgggtttaaaaggatacgctgaatttaaagtttttttacggatcgataatcaaaaaaatgataaaaatgctttaacagataatatctttaatcattatatagaaactttagaacaatatcgggattatcattataaagaaattgtacaaagtatttatgaagctaaaaatctttatgtttatggaactggggtaattcaagataatacagcgcaacatttaaaacgttcattttcaatggtgaataagttatttttagacattgatgtattagcagattttgaggcttatattaatttgtttggtagtaatgatgtttttattgctatttcttatgctggtgaaaatcaacgcttattagattatgtttatcgtttaaaagctaagggagtcattgttgtggctattattgctaataatgattgtactttatctcatgtggccgattatagtctgcatgtaaagacattaccagtcatgacaaatcaagggcgtcgtgaagatctggtggggaactattttattttaattgattttattattgccaattatattgaatatgctaaaagtagaggaaatgaataatgacattagataaattagtagaagataattaccatcaattgaatgaaaatgacttatatatctggcaatatattttacatcataaacgggaatgtcaaagaatttcgattaaagatctagcacgtaattgcaatgtatcgcatactagtattttacgctttacaaaaaagctggggcttgaggggtttagtgaattgaaggtgcatttgaaatgggacttggcgcaaaagccaaatttcaaaccacgaattatagacgatacttatcatgaatttattgaaacaatggaacgaatgaaaaatcgagatttaactaatatcatggaaatgattgaaaaagctgaacgagtttttgtttatggaactggagttgttcaagcaaatatggccggtgaactgcggcgggtttttctttatacaaacaaggtttttcatgctgtaggtaacggaacggaaatcgatacaatcttaaataatgtaactaaaaatgatttgtttattattatttcattatcgggcgataatgaaacagcagtaactttagcacgcgctttacgagggttacatattccaagaattggaattgctaaggttggaaatactttattatcaaagtattgtgatgatatgattacttttagatatgaaacgtttaaagtagggatgtcagatattctttatggtagtaccgcccacttctttattatttcagattttttatttttgagatacttagaatattcacaagagaaaggatagatgtaaagaggatgattaaatgaaactttaagagttatgaaaattttgttaaagataaaggccctttaatggctaattatgctttgatgggagatggtaaagttattgatggtgagctttacgaagaattacgaggtaccgaaggatgctgaaaatggcgatactattcatgtggtcgtagaagttcaagataatggtaaacatcagttgaaacattgtcaaagagttattattacagttaaatagttttatagcagctatattatttatatagctgctttttgttgagaaataaatagcttataaatgttttaaaggacgtcagtaatatgacgtccacaatgtttaattaatctttttttggtttatcagttactaattcttttaaagaactagctaaaccggcaataccttgaatctcactaggaataataatttttgtggcttcacctttagataactcttctaaggctttaaacccttgtaatgttacatatgcactgtctgggtttgcttgattaatatatgtgatacctttggcttgggcttcataaactaatcttaatgcttctgcttctccttcagcaattgcaattttagcttctttatctgctgttgcacgtaaaatcattgattctttatcaccttcagcatttaagatagcagcagtcttttttccttctgcttgtaagattgcttcacgtctttcgcgttcagctcgcatttgtttttccattgcttcttgaatatcccgaggtggaataatgtttttaacttcaacacgatgtactttgattccccatggatcagtagcctcatcaagaatactacgcattcttgagttaataatatctcttgatgtcaaagtttcatctaattctaaatccccaataatatttcttaatgtagttgctgttaaattctcgattgcgttgattggtcgatccacaccataagtaaatagttttggatcagtgatttgataataaacaacagtatcgatctgcatcgtgacgttatctttagtgataactggttgtggtgcgaagtcaacaacttgttcttttaatgaaactttattggcaactcgatcaaagaaaggaatcaagatgtgcaatccaacattacatgtacgattatatgctccgattctttctacgacatatgcccgtgattgtggaacaattctaattgttgaagcaatgatcgtaattacaataattcctagaaaaacccataatacaatagcgacaattccgtccataatatttccctctctattcttctatttttttaacaactaagtgagctccttcgattgccatgatttcgcagtactcaccctcgttaatagtgttattatcaacacttgcagctagccatgatgttgacataacttttacttcacctttagtatctgcagtaatcgtcttagttacaagcccatgcttaccaattacacgatcgtaattggttttttcaatatttgttcttaaatattttttagcaataggtcttgtaacaaagattgcgatcgttgtgacaattacaaacaaggcaatttgaattgcttggctagcccctaataaatcagcaattagggcaacaacaccacctgcagcaaaccagatgcttactagatcaatagtaataatttcaacaattattgctacgatgataatgcctaaccaaataggtatcatttataatccccctccttaaagatccactaacagaatctgatgtattacatcaaacttagcagtatactttacacagttgttattgtctaaatctaaattatattcttttgatagttcactaataaagtttttatttgaaattcgtccgtagctttttccaatggaaattctatgcaattgatcttctggatataacgcatcatttatttcttttttaccaactggcttaattcccaaaacatttttatttcgatcgattcctaataaaacaaaatctacttcttcaaagtgccgacaggctgctttatttaatgttagattggtgctgtagatagtaactgtttttttagcaatatcattagttgaccattcaaattccataagtatcaccctttctatcactattatattataaaaattatttttattcaacaaaattattgaaataaaaaatagcagttatttctgctatttagcaacactatagaaattagtagtttgataattataaatgatatttgaagtgttaaataactgtccgtttgataaatgaatattatcattgatcataatggctggatcattttcttcaagttctagtaaagcagcatcttctttgcttaattttattgcagttagatatttatcagcaaaaccaaaagagatttttaaatcatcttttaaataattaaaaattgatccttcagcaatttccttacctaaatagggtacgatttccttattataatatgttcgctctaaagcatatgggataccgtcgacaatacgaagacgctttaagtaataaactggagttccaactttgcagttcatctgttcacttaacttttcatcagcttcaactatttgaatatctaataatttattaatgattttattaccgggattatccattgtcaccccacgggtcgagttaagatacactgttccttttttctttggggcccgaacaaacatcccgcttccttgaactggataaataatgcctaaattcattaatattttaattgcattacgaattgtattacgactaaccccatattcttcaatcagtttttcttcagtaggtaattttcgagtctcttcaaattcttcattcattatccttttttgaagatcatttacaatcatttcatactttaacatataatcacctcaaaactcattatatcatattagtcaagtttcacaatatttattggtatgaatataatttattctatttttattgtgaaagcgctttacattaattcttcattggaatataataaatttgtaccaataaatttggaggagaaaagatgaagagaatattgaagggagcattagtagctctaatggttgtttcatcaactattggggttaaagcagagtcgaagatttcagccgaagtacaaagaattattgatagtatgacaccggttgaaaaagtcgcacaaatgattcaggcggatactcgctggatcactccagctgaagtggcggagtataagattggttcaattcttagtggtgggggagcagcaccaactagtggaaatgaattaagtaattgggtaacttcagcaaatagttatcaaaaagcagtaattgatagtggtggtattccattgttatatggaatagatgcggttcatggaaataacaatttgtatggagcgactatctatcctcataacattggattggcagcagctaataatactcaattagttgaacaaattggggaggctactgcaagtgaagttagagcaatgggagccaactggacatttacaccaacattaggtgtacctcataacgaacgttgggggcgtacatatgaaacttttggtgatgatgttgaacgggtaactaatttaggtactgcatatattaaaggaattgaaagtgatggtgatactctatcgtcagcaaaacattatttaggagaaggattaactactaatggagctaaccaaggtaatgtagagcttagtgatgctgattatcaagatctaatcaatgcaaatatgaataatccaatggttaaggaacttttaacaccttataaacaagctattaaacaaggaactaaatcaattatggttacctataatagtatcaatggtaaaagatgtcatggaaataaggacgttgttacaacgttattaaaagaaaatcttggttttgatggcattgttattagcgattataacggtcttgatcaaattgagaatcaagcaacttataaagataaggcaattgcttgtatcaatgctggtgttgacgtcttgatggtagcagaaaaagatggttcaacaccacgctggaaaaatttatataatgctttagttgaagctgttaatgaaggaaaaattagtgaagaacgcttaaatgatgcagttgcaagaattctaactgctaaagaagaattaggatttttagataatccttcaaaagcatatgctgatgaggcagatcaagctaaatttggtggtagtgaacatcgggcattagctaaacaagcagttagcgaatctttagttttattaaaaaatgatgaagttaatgctggtaaaacagtgatgcaggctttagcagatatggataatatcgtggttgctggtagtgctggtgatgacattggtaaacaatgtggtggttggacaattacttggcaaggggcaactggaaatacaacacctggtacaactattttcagtggtttaaaagcagcgatggataaaaagggtggaacaatcagctataatgctaatggtgtatttacaaattcggacaataaagttgatgcagcaatagttgtagttggtgaagacccatatgctgaaagtaatggtgatcgcagtgctggacaattaaaattaccagctaatgatattagtacaattaaacggattgaaaatagtcatcctgatttaccgattattttagttttaacaacagggcgaccaattgcaatggctgattatgttaatgatgatcatatcaaagggattgttaatgcatggttaccaggtagtgaaggtgacggggttgctgatgtactattaggtgataaagattttgtaggaacaaatccaattacttggatatggtatcctcaagatattactagtaagtatgatgattcaagcaaagtattatatccggttggatatggattgaaaaaagctcaaaaaaccggtgattttacagcaccagctgatcctaatgtgatagatttagcgaaaactaatggaaaattagaagccgaggcgtttgtggatgcacacagtgaaattaagttagaaaataatggtacaactgtagggtatttacaagatggacggcatatgacttataaaattaatgtgccagaacaagcagcatataaattaactgttcaagcagcacgtgaatatgcagcgacaattgatggagcatttgaattatatttagatgatgaattggtactagaaaagaaaaatacaccaattgtttcaacgggcagctggactaagttcacagctcaagagatgacagctttggttagtttaaaagcggggatacacgaacttaaacttgtagcacgcgataaagattttaatattgattattatatttttgaaaaagctggtgattatgttggtccaatcattcctgatgaagtaacaaatgagggaactggagcaatgttacaagaaggagcagttgaagtaagcatgtcttcttctgaaaattcacaagatatggcttggtataaaggtgaatttgagatttctaataaaaatgcaacaaaagatcctcttgatttacgtgttgcagatgattctagtcaaacaacaattgttgtaaatgaccaaaaaacatatcaaagtgttttaggaatgggaacttcaattgaagaatcaacaatttacaatttattaaagatgactgatgaaaatcgtcaagctttcttaagaagattattagatcctgttaatggtatgggaatgtcgttaatgcgggtaacagtgggaacatcagattttacggcacaagacttctacacttattatgatggtacaggaaaagaattagatggtaaaccagattggaataatgttactggtaaaggatttagtattcaaaaagataaagatttaggaattattaaagttattaatgagatgcaggctatcgcaaaagaattaggagtagaagataatctgaaattctttgcttcatcttggacaccaccagggtggatgaagttacctacttcaagtagtaattcatatgaggataatgaattattattgaagggtggtaaattaaatgatgattatattgatgatttagctaaatatatggttcgttatgttgaagaatatcaaaaatgtggtattcctatctatgcaatgacgattcagaatgagccattattagaaattaattatcctagttgtgcaatgacaggaacccaagaagcaaaaattgctaaagcaatcaaagctgaattagcgaaaagcactgtgttaaaggataatgaaaaagaagttaaactatgggcgtttgatcataattttgatggtgctgataaatttatggctgatttctttaaagaagctggtgatcaattaaatattgatggtattgcattccatccttatggtggtaatgcttcaacaatgggttctttctatgatagatataaagatcaattaagtatgaacttaacggaaagatcagtatggggtactagtggtgctaatgatattattacttggttaagaaacggttctgaaagttataatagctgggttacgatgttagatagtaatgttggaactcatcattgggttggaactccagatccaacgttatttgtgcaggatgctaataatcctcaaagatattgggctactccagaagtatatatcatgtcgcaatttactaaatatgtaaaaccgggatatgtccgtgttgatacaaataatggttctagttcaactgtaacaaacgttgcgtttaaagatcctgaaacaggaaaaattgttatgattgttgcaaaccgaagtggtactgatcaaaaattcaaagtaatgatgaagggtgctcaatttaatgcggtattaccggctggtaatgttgcaacatatatttgggatggtagtgatattgaaataaatgcattagatgttccaggaacatttacagctgataaatgtagttcagctactaatgctaatattaatacaacagaccatattattgattatgtaaataaaaatgcgagtatagattatttggttgatgtaaaagaagccggaacatataatgttatgattaaagttgcttctggtgaagattgggaaaataaaacagtaaacgttaaatcaggtgatacagttgttggtactactgtggcacaaagatttaatttctggggtggtgaatggcaagattaccgttatatccaagttcaagcaaatctggaaaaaggaattcaaactctaacgatcgaattgccagatggcggtatgaatctaagtgaaattaagatcaataagacaaaatacagccatgatgtgcctgggtacattagtgctacagattactgttacggtgaaagaattattgtagaagatggaaatattggtttctttggtgagtacgaccgagttaattatcgggttaatgtacaaaaagctggcacttatcaaatgaagatgaactatgctagtgatggagaagcaaaattttggatggatttaattcaaaatggtatctctgcttcaattggtgaagcaacactctctagtactggtaacgatagcacttacagtactggggtagtagagattaatctgcctgaaggtgaaagccaaattagttttgtcccacaaagtggtgtaagttttaacttgaaagcattatcgtttggctcatatattcaaatttctagtgatgaattagaagaaggtaaattagctggtaaagaaattactgttaatttaaaagatggaaaatttgaaactgatttaaatcaagctaattgggtggttgaaggattgcctgcaggtattacttattctttaaagagaataaatgatacaaaagcagtaattatattaaaaggtaatgaagttgtagattatgatagtaatcttacagtgactgttaaagttgatgctggtgagattggtgatactggttatagtttgagtgatagtgtaatgattgctgcagttgatgatgacgaaacattattagatattggtgatcttgcttttggaacaactgaatttgatttaatgattgaaggcggaaaattcaatcaagatttaaaagtaaatgatcttgttttaagtgaagaagcagctaattatatgactgttaaagcgataaaagtaagtgctgatggaaacaaagtaacagtaacattagaacgtaaaaatactaattatgaagatgttgcagggacaattagtataaaatcaaacggttatagcgatggcaacgtcgatttaacagcaaatcttaaattattaaaaacaaataatctaccagatagtattgatgttggtgatattgcggtaggattaaaagaaagtgatgcatatcgtaaaaaaggtactttggttaatggtgctaagggagattatattgacttctatttgaatattaaagaagaaggaaattatgtattgacatataagattaaagatagtgaagcaattactaatggtttaaaactaagtggtggtttaggattggctactgataatcttggcagtgtttcttttggtaaatattggggaaatgcacaaggttatgcacagatgttgaatttaaaagctggtgaacagactttaagatttgaagttaatagtgctggttttgaattaactaatttaaaaatcgaaaaattaactcaagcaattgaagttagtgatacgcttgatcaaacaacgacgataacggctgacaaggtagttgatggttctaaagaaattggttggggaattgaaggttcaacaactaaaaatattggttttggatctgcaggagcttatcaagattattatcttgatgtaaagacggcaggattatacgatgtaaaggttaattatagtcatgattgcggtggcgatactaaagctgttatcatgacagtagatggaaaaataactgctactttgggtgaagttactttaaagaattctggtggctggtcaaattggaaagatagtgacacgattcaaattaaattagaagctggtaaacaatttattcgtatttatgatgatctagacggctttaattatcgtaatttccaattaacatttaaaggggaacaggatgtcactgctccagaaattacgggtaatgatgcagttatctatgtaaatgatgcaacagatattaaagatttactaggattaatagttactgatgatgttgatggtgatttattagataaagtaacaattagtggcgaatataattacaatgttgcaggaacttatacgattacagtgactgtaagtgatgaagctggtaatgaaacaagtaaagaatttacagttaaagtagttgaacctgcaaaattaattgttgaagataaagtattaacagttggcgataaatttgatccattagctggtatacaagttttagatgttgatggtacggatattactaaaaatattattgtaattagtgatggtgttgatacaagtaaagcgggaagttatgaagttatttacagaataactgatgctttaggtaatgaagtagaatttagaagaatggttgaagttaaggacatcgaaccagatgttaaaccagttgatcctgatgagcaaacaccatcagataatagtggtcaacagactattccaggacaagtagttgaagcagctaagactagtgatgatgtaaatatcacgggtatgtttggtatacttgtattagctggattaggatggattggatcaagaaaaagaaaattttgtgattgttagataaaactctctctccttgcgataaggactcacattgtgggtccttatctttttttataacagcatataacagttgacaatcagttatacactgttatatactgtttgtgaagaggagggagaagatgaagattatcataaataattcatcgatgcagccaatctatgaacaacttgttgaacaaataaaagctcaaatcataaatggtcaattgcatgaaaatgatgtattaccatcagttcgtgcgttatcaaaagaattaaagataagcgcattaacagttaaaaaggcgtatgatcatcttgaaacagaaggatttacagcaacgattcatggcaaaggtacttatgtaaaaggggcgaatcaagagttgttgttggaggagcggcgcaaagaagtcgaaactgaactggaaagtaccattgataaaggaagacgttacgggatgaacgacgatgagataaaagctttatttaatttgattatggaggaataagatatgttagaactaattaatgtgcaaaaagattatggacgttttaagcttaattgttctttagaagttaaggctggttgtgttactgggctgattggacaaaatggtgctggtaaaagtactacttttaaagctgttttgggtctgatttcagtagatagtgggactgttaaattatttagcaaagatattaaaagattaagtatagaagataaacaaaatattggggtcgtgttatcggattcgggatttagtgaatatctgaggattgaagatatcatccctattatggaatcactgtatcgtcattttgataaacagatgtttattgaaagagttcgtcattttgaattaccattaaacaaacaaatcaaagaattttcaacgggaatgaaagtaaaattaaaagttttgattgctttatcacaccaaagtaagttattgattttagatgagccaacagcaggcttagatgttattgtgcgagatgaattgctggatatgcttcgtgattatatggaacaaaatgaagattgtgcaatcattattagttctcatatttccagtgatttagaaggactatgtgatgatttatatatgattgatcagggtaaaattgttatgcatgaagaaacagatgtattattaagtgactatgcgattttgaaagttgatgaggaacagttttatgaattagataaacaatatttgctttgtcaaaagagagaaagttttggataccgctgtttaactaatcagaaacaattttatttagaaaattatcctgacgtggttattgaaaaaagtagtattgatgaggtaatgacattaatgattaggggtgaaaaataatgaaaggcctatatattaaagattttaaattaatgatgaatcaaaagatgttttttatcgtaattgcagcaatggcaatattttttgcggttacccagacaaatatattttttgtaattagttatgctacttttattgccgcaatgttcgttataagcagtattagttatgatgaatttaataatggcaatgcgtttctctttactttaccagtgacaagaactggatatgtcaaagaaaaatatttatttgcagctactttggcgaccggggcatggctggcagctacaattttatcgatagtggttgtttttattcaaggaactgaggttattattttggagtggtttttaactgcggcaatgatcttgttagtggcattaatgatggtcttaataataattccagttcaacttaaatttggtcaaagtaaaggaaatgtagcaatgctgttagttatgggtggtgcttttgcaattggctatttagttgtgtcagttctttcaaattttggaattgatgtatttgcgatgattgatgcattaagcacgattggattaagcgggttgttgatgattttactcttaatggttgctggtgcggggataatatcgtatttgattagttgtaaaattatgacagaaaaagagttttgatgataatgagcaatgaaaaaaatattaaagatattagtgattgttatctttgttactagtttactaggatgtcaagataagtatcatgaaacatatactttgcggtattattatattgaaggttgtgctaattgtgaattttttacaaaaaaagggattcctctaatcgaaaaagaatttggaaaacatatgaagatcgttaaatataatatggatgatgcaacttcgtttgataaagttaaaaaagcttatgatcatgatcttgaacagcttcaggattttgattatgatcaatatggtgttgggccgtttttagtcctcgagaatcattatgctcaattaggagtttatgatattgaaaaatttttaaataatttaattagagcagttagtggtgagaaattgatggcaccagaaaaaatcgaaaaatactattattttaaaaataattaaaaaagtatctattcttaatgagtagatgctttttgcattagtatacatttagataattttgggttataataacgagtgaggtgtaatatgaaaaaaatatttaaaatcatgataaccttggtactcactgtaagtttatttggttgtcaaaaaaaggaaaagaatgtttatacagaaacatatacattacagtacttttatttagaagggtgtcctaattgtgagaacttcacaaaaaatggtttacctttaataaaagaagagtttggtgatcatatgaaaattattgaatatgatatggatgatacagagactcttacagaagtaaaggctgcctatgatgaagtaatcaatagcattattgattttaatcaagatgattatggatttggtccttttttagttcttgagggatattatgctcaattaggagttagtgatgttgatgattatttagaaaatctaatagcagcaataaaaggtgaagaattaaatgaacctggagagattgatacgtattattatttaagagatggaaaggtaaaggaggaataaatatggccacaccacataatcaagcgaccaaaggagaaatagcaaaaacagtattgatgccgggagatcctttaagagcaaaatttttagcagaaacttatttagagaatgtaaaacagtttaatacagttcgtaatatgttcggatatacgggaacttataaaggaaaagaagtatcaatcatgggttcgggaatggggatgccatcgattggaatttatagttatgaattatttagtcagtatgatgtagaaaatattataaggatcggttcatgtggttcttttaaagaaaatgtgcatttaagagatattattattgttcaagggtgctgtacggattctaattttgctcatcaatatgaattaccgggtacttatagtgctatttctagttatgctttattagagcgggcagttaataaagctaaagaaaaagacgttgtttaccatgttggtaatgttttagcatcagatattttttatcatgctgatcaaggttcagttgaaaaatgggcatcaatgggttgtcttggagtagaaatggaatcatatgctttatttgctactgcagcctatttaaataagcgtgctttaacattgttaacagtatctgattcattggtgtcaaatgaagaaacgtcccctgaggaaagagaaaagacatttacagcgatgatggaaattgctttggagattgcttaatgaagcaaaagtttgcgttttttgattatgatgatactttgattcatggtgattcaggaagagcactattaaaatattatttaaaaaaacatcctttagcagtatttagactgctaaaggtagcagttgcttttcctttatcgataattgggttagtaaaatttcaaacggctaaaagtgcctggttgtttccaatggataatctaagtgatgaagagcttaatgatttttatcaaacatgtcttattcctaaatattatcctaatgtagttgcagaattaaaagataaaaaaaatgacggttatcttgtttatatctgttcagcatcgattgaaggttacttaagattttgtgatctgccggtagatgggatattaggaacgaaaacagaggtaatcggaggcaaatatacaagtcgaatgattggtaataattgtaaaaacgaagaaaaggtaacacggttaactgcggttatagcgaaattaggggttgagatagactatgaaaattcatatgcttattctgattcaatgcacgatattccaatgttaaaaatggttaaaaatagaattagaataaataaaaaaaatggagaaatgactccattcataattgaagagtagattactactcttttattttgtatctaaatcagtaaatagtagcataatattaataataccggcaataccaactaaaatatatattaacattgataaaaagctatcaacaccaaatagagaatcaactaggttgaaattgaataaaccgattaagccccagtttatcgctccgataattgttaatactaatgaaattttttgtaatatattcattatcttcatcctccttattaaagtgtatccattagaaatatctttatacataatatttatttttaaacatatttattattgggggtgtaaatttgaaaaaaatatatattggtattgccgcggcagttgtgatagtaatcgcagcgttaactttctttaaaatgaaagatagttctttagataaggtgattgaaaaggttaaggcttatgataaatatgcacttacttgtaatatggaaatggttgaaaatgatgaacttaaaagttatctagtcaatgttagttatttaaaagaaaaaaagaatgaatattataaagtagaattatatgataaatcattgaatcaatcacaaatcattgttaagaaccctgatggtgtttttgttttaacaccaactttaaatcaaatctttaaatttcaaagtgagtggccgaataattccccaaaaccatacatctatcaatctctaattgaattattagaaaaaggcgaagtggaaaaaataaaaacaggttatcaagttaaatgtgaagtgacttatccaaatgattcacgggtggtagctcaagaaattatttttgataaatcattggcgccaaagcaagtaaccgttttagataaagacgaagctgaaataattaccgctgattttactgattttaagacagatgttaaattgggaaaagataattttaatgagaagaaggttttagaaaagagtactaatgagtattctaatgtttctagtgagttaccattatatccagttgccttaatgggaagcactttagatagtgaaaaagtttcaacgattgatgggacaactaaccatattttaaaattcactggagataagaattttacagtaattgaaacaccggtaactgctagtgaagaagttgcagttgaaacggtaagtggtgaagtaattgatcttgttgatggtgtggcattttataatgatggtcaattaatgatgatgaaatcaggtgttttatgcaaattgtattctcaagatttaaataaagatgaaatggtcaatgtaatcagtagtatgcagacatcgagtttaaaatagaggcaaaatgcctctaatacataattatgaaaatatttgaattatcaattagattggattatacttagacaagatggaggtgtcatatgagtttacatcgtgatacatatgcagaaattaatttaaaatatttaaaagaaaatattgaaacaacatataaaaaatttaaacgtccgttaatggcggtaattaaagcggatgcttatggtcatggatatcgagaagtggccacatatattaaagatattgaatatcttgagatgtttgcagtagcaaccttaccggaagcaattgagttacgtgaattaggtattactaaaggaattttaattttaggagctgttccaacttctaaggaagaaattgatttagcaattaaatatgatatttctttaacaatgatctccttggattacatgcatcatctagaaacattgatagatcaacagccgttgaaaatccatattaaattagatacgggaatgcatcgtattggcttaactagcaaagcacagttggatgagatgttaaatactattgattacaataagtttatcttagaaggaatttttacgcattatgcaacagctgatggtgaacaggcagcttttgaccagcaaagagaacttttttatgatttagtagctgatcataaatttaaatatattcattgttgtaatagtgcggcaatggcttatcatcatgatgatcgttctaatttagggagaattggaattattatgtatgggatcgatccagctggtaatgaaacaaaggaatttaaacaggtaatgtctttatattctaaagttgctctgattaaaaaaattaaagctggtgaccgagttggttacggcttgacttacactgctgatgaagatgaatatttagcaacgatcccaattggctatgctgatggattgattcgtaaaaatcaggggcggaacgtttatattaatggtaaatattttgaaattgttggtcgtgtttgcatggatcaaataatggttcgggtagatgaaacgattaaagaaggggataaggtagagatttttggagcgcatataagtttagcgagcatggcaagagaacttgaaacgattccttatgaaataatttgtttgattactaaacgagttgaccgtttatatataaaataaaaaaacagtacaatgatgtaaaatctaaatgttagcgagagactgactataatagatacatcattatgctgttttttatttgtacaattgacttaatcggtaatatgataaagcaccagtcttagctgttttgacttttcctttttcatatactaatgtttgtggtaccgtaccatcagtgatatcgagtttttcttctagccaagtagtataatcactgtcaccagaaacgtctacatagtatagagatttactacgatttttttctacaaatgtggtcatggtttgttgatatgataatgttgtattatcactattatttccgataactacgacaaaactatccttatctttaactttttctactaatgcactttgagtaatcgttgtgtattcaacatgggttattttccgatatacaaataatccaatgaacactactaatacgattccaaagatgctaatttctttccacaatttctttactttttccatgattagcctccataatatacctttatataataacaaatatttcagctaaaaacaatatataataaagggatatgatgtgacatatcccatagttaaacttatttatgttttaaagcataattccaagtgtcgcgacacatctcgtcaattcctttggtagctacccaatcaagctcttccttggcgcgagcaggattagcataacaagtagcgatatccccaggacgacgatctttaataacgtatttaacttttacattattgactctttcgaaagctttaactaaatcaagaacactatatcctgtacctgtaccaagattacaaatatggactccaggattagcataatgttcaattgcttttacatgccctttagctaagtcaacaacatgaatataatcacgaacgccagttccgtcatgtgtatcataatcatcaccaaatacacctaagcattctaattcaccagttgcaactttcatgatatatggcattaaattgttaggaatccctttaggatcttcaccaatcaatccagattcatgggctccgattggattaaagtaacgtaacaatgttactgacatttctgggcatgcatgttgaacgtcagttaaaattctttccatcattgctttgctagtaccgtatgggttagttgtttcacctaacttacaatcttcagtaattggaacggtttctgggtcaccataaactgtagcactagatgaaaaaacaatttgattaacatgatattttttcatcattttactaacgatcaaagttgttgttaagttattagtataatattcaattggtttttcaacagattctccgacagctttaaatgctgcacaatgaattacggcatcaagtttattttccttaaagacagcttcagttttttcctcatctaaaatattaaattcataaaattttacttctttaccagtgatttgtttaatataccccaatacttcaggtcttgaattagagaagtcatcaatcacagtaacttcataaccagcatttaataattctacacaaatgtggctcccgatatatccggttccaccgcaaacaagtacgttcatcactatacctcctaatatgttttaataataccatttttaactttttaataaaagggattagataaaataatcgagcatatcattgaagatatgctcgacattttatttattgagaactgctttaactatgttatcgctagcaaattcataatctaaaaattccatttcaaagacaccttgaccttgtgtgattgaacgtagatcaacggcataattcatcacttcactcattggtgcttctgcaacgattttgattagaccgtcatttaaaacatcactgccaattacccgagcacgtttagtattaaagttactcatgatgtcaccagtgtattgttcatcaacgaccaccttcattttcatatatggctctaataaggcgggacttgcttttgggatagcttctttaaagcacattgcagttgcagttttaaaggccatttccgatgaatcaacgttatgataggcaccatcaatcagagtagctttaatgcctaaaacagggtaaccggctaaaacaccacttttaacgctttctattaatcccttctcaactgcaggaaaataagatttaggaactgcaccgccaaatactttttcttcaaaaagatatgattgactgtaatcgtaggtaggctcgaaagtaatttcgacttcgccgaattggccatgaccacctgattgttttttgaatctggttctttgggtaatgctcttattaattgtttctcgatatggaatcttgatattttctaaagtcgcttcgactttaaatttgctttttaatttatttaacatcatatctaaatgaatgtctccaattccatagatgcattgttgttttgtttcaggattactttcgaattttaaagtagggtcttcttctaagagtttattaattgcatttgcaattttttcctcattacttttacctaagggaacgattgctttaccgtaatatggagttgaaaattcaatctctggaacaataatttgataaccagcaatgcacaatgtatcattagtttttgaataactaagttttgtaactgcgccaatatcaccagcatgaagacaatcgacctcgattaaatctttccccctaggttgatatagtttagcgattcgttcgacttctttttcttttacattatataatgaactaccgctataaagggttccggtaacgaccttaaacaatgtagttcggccgatgaaaggatctgcaattgttttaaagataaaaatacttgcaggaagactttcgtcataaccgatgatttcttcttcatcagtgtcgatattttttacgattaatgaatttgtcatgtcaccagcagcgctaaagaatgcaacgattgaatttaaaataatttgaataccaatttgatcagttccgcataaaacgggaataagagtgcgctccattacccctttacgaagtgcccaggaaatttcttctttcgtaaatggttcttcattaatatacttttctaatagttcatcactggtattagcaacggcttcgtcaatcatttctttaattggccgaacttgttccatcaattcaataggaatatcagttgccttggtttgctctccatcaaaaattcgtccctccattttagctacattaacataaccgaccattttattattatccatgattggtacttggatgggagcaatggctttgccatacgtatcctttaattgttgcagtttagttgcatagtcactgctagggttatctaatccgttaatatagatgattttggctttatctttagctctaaacatcgcttgttttgtaccggcactgattcccgctgaagaaggaacgacgatcaaagctgattcacaaacacttagagctgcttcgcattcaccaacaaagtcaaaaattcctggaacatcaactaaattgattttacagttattccattcaacaggaataacagctaaattgacagatgactgacgttttatttcttcttcactatagtcgcttaaagtattgccttcgctaatacttccggttcgattaatgatgccgctgcgatatgccattgcttcaacgatgcttgttttaccgcatccagagtgccccaagacagcaacatttccgatttcgttcgcatgataagttctcataaaataccacctttctataaatgaacttctttcttttattttatcataatgacagaaaaaattattgtaatataataataaaaaagagcgcttacatatgttggtttgtaaatttcttttagtgttataatgaattgtttattttgtttagagctttcaatgcatacacgtgcgcagtttttcctaaaacttttaattaaagacttatttttggcaagatattcaattaaaaggagtattgattattgaaaaatagctaagcaagtaaatgattagattactttttcatttttaacatatttagtattatcatgctgagtatttttattaatctgttcagtctaggattttatcaaaaaacagttaagtcaaatatagttataaatttttattttacctatctctaaaatttatggagtgattagatttcaagttgtttccaatatgaatagttatatgaggatattttatctatttaataaatgctcattataaaatgagttttaacagaaaaaattaaaaaaattgcaaaaaagtgttgaccttttgtttgataattgttatatttatatggcagtcaacgagacactggaggtttagctcagttgggagagcatctgccttacaagcagagggtcagcggttcgagcccgttaacctccaccatttaaaataaaataggccggcttagctcaattggtagagcaactgacttgtaatcagtaggttgagggttcaagtcctttagccggcaccatgatggaggagtagcgaagtggctaaacgcggctgactgtaactcagttcctttggttcggtggttcgaatccgccctcctccaccattcattggggtatagccaagcggtaaggcaacagactttgactctgtcatctccctggttcgaatccaggtaccccagccattaataatgacccgctagctcagctggtagagcatctgacttttaatcagagggtcaggcgttcgaatcgcctgcgggtcaccatttaaatttttatagccacgcccaggtggcgaaactggtagacgcacaggacttaaaatcctgcggaccttaaaatccgtgccggttcgattccggccctgggcaccatttctgcgggtgtagttcaatggtagaacttcagccttccaagctgactacgtgggttcgattcccatcacccgctccataatggagttaacacacttactaagtaagtgtgtttttttgtattattacctaactgacagctttcttttttcaataacaattgctgatataattaaaacaagtgaaagtaaaagggaataaattattcctgaagtcggtaaaacgtttttgttttctagagctgaaagcgtagtcataacttgtttttgagggaaaaattgaacaacataattaaaaatttcattatttgttacttgagtgatcccgccagagacaatagttccaataattgcaaacatatttccaaacatcatactttcttccaaagattttgataagacattactccaaagaccgaatgaagttgcaaagaaacataaaagtgctaagattaaaatgaatttccagagtgcaatcgataaagtgatcttaaaaacaaaaagagcactgcaaatgattatcgtggcaggaataaaaagaaaaatataaacaacaataaaatgactcaataaatactgataacaacttactgaagtactcaagatgcgtttgttgatgccagttcgttcatcaaagtaatatttataaatttgtccgccaagaagaagtatcaccatcattaagaagcctaatatatttgaagcactgccacgctgattatcattaacgggtaagctgtctatttgaccatttattaagagggtgatagtttggttatacgtttcacctttagtggataagacatcaatatttttatcatcttggactattatggcatcatattgatttaagacaagttcggaggtactaggaagagtatctagataagtatatttgatctgagaattttgagatgtgtcaatatctcccacgattcctatttgtattgtatgagaaatgctgttggtaaagtatattgcaagtgcaatgataataggaatcaaaacaagataagtaattagaaatgctttgttgtgcttgattcgatataatattagttttatgagtttgtacattctttttcctcctaaatatagtcttctggacgatagtttttatggacaacaagtagtaaaagtgaagatagtgtcaaaagagcaaacatgatccaccagtaattagtactttgtccatcgtaaattaattgaaaaatacaatcgacagtccatttgattggtgaaaaacttgcaatcttttcaaaaatagcacctaaactcgcgattgggaaaaagattccagatagaaagcctaatacagacattgagtttgataaaataacatttgtgagttcttcactatgaagagtaacacaaatagcactgcttaatattgtaaggaatagaacaaagtttattattaagagaattacatatccgattttatcactaccgaagtttaccaatgatatcgtatcaaaaataatgatattgattgttaaggcaagtgccatgaataaaaaacatgtgagaatctttgagctgtagatcgacacgcgagatacagggctgtaaaagattcgggtatttccgtttttgatatgcttttctagaaaagcattagcagggacagtagcgcccatcatcgcaataaaaaatatcattgttacaccgtaaaaatcataggaactgattatagttgtatgatataaattatcaaataaaaaccccattaataaaattaagattgtaggaaaaataagaaaaacagataaggtacctgggctggaaataagattatatagatcgtgtttaaataaagtccaaaattttatcatgatcaatcccttagcttcttcccggttagacctaaaaataccatttctaaatttccttcttctgtttccattttattaatatgacattttttgtgaacaaaaagcataatgatcttatctaatgcgtcgtaatttttagaaactgtgattttaaaattatctgcattagttttgatctcttcaacaccattgatagtacttagtgatattgctagatcgactggaaaatcatcagcatagatggtgtagataagagtgtctttatatttggctaaaagttcttttaatgttccttcggcgatcttagtgcctctatccataataacgattcgatcagcgatttcttcaacttcttccatataatgggtcgtataaataatagttgtacctttttcttttaactcctttaatgaggataaaatataattccgtgattgtggatcaattcctacggttggttcatctagaattaataatttaggattatgggcaattgcacaggctatatttaaacgtcgtttcattccaccactaaaggttctaggatcatcattttttttatcggataagccgacaaaagttaaggcattcattacttgttttggtaaatctttctttttaacaccgtataatgaagcgaaaaaggctacattatgataggctgaaatatcttcgtataatgcaatttcttgagggacaataccgagttgagcttttattttattagagtgagatgttaagggcaagttaaatatgttaatggtgccagtatcactggttaaaagtgttgatagaatattgattgtggtacttttaccagcaccattaggccctaataagccaagaatctcaccatcatagacgttgaaagataagttattgatagccttgttatgctggtagcttttattaatatttttaacttctaagatttttttcatattatttcctcctatctacaatatagctgatttagtttgtagagactacaaactctactttgcttttaaggaactattggttgcaaagctggttgcgaataaaaaaatgatattttttataaaaaagtgttgcagatcatatagagataatgttaatatatataagtaacgaaaatgaaatgcgggtgtagttcaatggtagaacttcagccttccaagctgactacgtgggttcgattcccatcacccgctccataatggagttaacacacttacttagtaagtgtgttttttttgtgaaatgatgctaataagatgcaattttgatgtacgatgaaagtaatagaggtgatactatgaataaaattttgatcgttgaagacgaacaggcaatttgtagactaattaagattaacttatcagatgctggatatagctgcaaatgtgcttatgatgggaaaggagcaattgaattaattgagtataatcaatttgatttaattttactagatattatgttaccagaaattaatggctatgaattaatggaatatattcgtcctttagaaattccagtgatttttttaacggctaaaggtgatgtaaaagatcgggttaagggattgaaactgggagctgaggattatattgttaagccttttgagattattgaattagttgctcgggtagaaacggtactgcgccgttatcataaaacatcaacagttttaagtgtttatgatattagtgtagatacactttcacgagtagtgaagaaaaatgatcaagtaatcaacctaacagtaaaagaatatgatttgctactgttgtttattcaaaataaaaatattgctcttttccgtgatcgaatttatgaagcggtatggggtgattattatatgggagatagccgaactgttgatcttcatgtacagcgaatgcgaaaaaagcttggattggaagataaaatcgtaccagtttacaaagttggttatcgtttggagggagattgatgaattttttttggaagctgtattttagtatcatggcaataacgctcacctgttttagtgtgggaggctatatgctgattcaaacgagcttcgataattccttcgaacgcgaagtggaggctgtttatcaagaaaatgatattttagttaattcgttaactttagaattgctcccacatctagaggaacttacgataaaaggcggaacttttcaagaacggcttgatttgcttaaaaacttagtttctaatatgacagttgagacatttaatggtaatgtttcgttttgtattcgagcggaaaatggagatgtagtatatcaaaatgatacttttaatgatgaccataaattgtttgataaaatatctcaaaatgagcgggggtatattgttcaaaaagataaggagcattataagttacaatctcttcgaatcttttctttgaatgggactaagttgtattttgaaaatgcgcgagatatttctgaactttttttaaatcgtgaaaatcaatttggaacactgttttattatacgattatattattattagctagtggagcagttatttttgctgtaactagatggttggttagcccaatcaaaaagctgtctaaagctactaaaggggtggctgatggacatttgattgttcctgtagtagttagcagtgaggatgagatcggtcagttaacaaaagattttaatactatgactgagcgtttgagtacaacgatgaaagaactgcatgaagcggttgaacgtcaagaagtatttgtcggaaattttgcccatgaattaaaaacacctctgacgtcgatcattggttatggtgatatgttacgttcgaaacgtttgaatgaagaagaagttattggctattctaatttgattgttgaagaaggaagacgtcttgaggcaatgtcaatgaaactgcttgaattgattgttttgaaaaaacaggattttaaaatgtattgggttacagctgagacattttttcaaggaattgtagatactgtagatttattgatgaaagagcagcaaattgagtttattattgaaattgagcctggaaaattgtatattgaaccagatttaatgaagacagtgtgtttaaatttacttgataatgcccgtaaagcagttggacaaaacggtaaagtatatttaagaggaaaggtattggcaacagggtatcagtttgttgtcaaagataatggttgtggtattgcagcaacggaattgagtaaaattaaagaagcattttacatggttgataaatcacgttcacgaagtgctggcggggctgggttaggtttagcgatatgtgaacagattattgaactgcatcatgcatcaattaattttgaaagtgttttgggacagggaactactgtaaccgttgttttagaaggagtgaaagttgatgaggtatagtaaaaatattattaaatttgcagctgcaataattttgttgatcatcattccgttagttccgttaacagtttctaaaatacaagatgataaattaattgagcatcttcaggtcgaaaaaataaaaagtgataataatgaaattcaaacaagtaagttgacggtcgctgaaaaattagagttgattggtgactatgaaaataaggaaaaaaatattattactacgacacaagttcaagatatgagtgatgaaaatattacgagaatccgaacgatcattaatgagcaattagttatattgaagaatcttggtattttaactgattttaattttgacggaaattatgtgtgttataattatacattaagacgctatagtaatgtgattgattctagtaaaagtgtcagtgtttatcaggtgaattttacgaatgaagaaggaatctttaatgccactatagatgttgatacgcacttaatatatcaatataattattataataaaaaatatatagcaagaaattatgaagtgatttatacttttggaacagcatatcttggtttgactgaacaagaaacttataagtatttattcggaataattgataatcgcaccgattcagtaagtgtttctagttataatgatatttattgatacaactttgatgcttctttggtgatgtttctatgcatctcttttatacacttgaaagtgtaaaagagatgtttttttattgaaaggggtaaggtgaagtgaaacagattaataaaatgaaagtgttagtagttactttgttgatgattgggttggttatgagtttatttattttagttaacgatcaagttaatcaaagtaataatcagctgatagctgctaataaggttaaaactaaccaaaataaatcggctaatagtgtggttaaagatgaattattaacattggttaattttgaaaatacgatacctaaagattggaaagttgatttagtgcaattgaataatgggcaatcagtcgatcggcgaatttacgatgatttaatagcaatgttacaagcggctaaaagtgagggattaaatccattgatttgttcttcctatcggacaaatgagaagcaagaacaactttatcaaaataaagtaagtgaatatttaagtcagggatattcaaaggtggaagctagcgataaagcagctttttgggtggcaagaccgggaactagtgaacatcagttaggtttagcagtagatattgtttcaacaaaaaatcagcgccttgatcgtagccaggaaaacacagttgaacaacgatggctaatccaaaatagttggaagtatgggtttgttttgcgctatccgactaataaaaatagtattacaggggtagggtatgaaccatggcattatcgttatgttgggaaagaacacgctaaaaaaataaatgagctgggtgtgtgtttagaagaatatgtaaaataaaggaaaatgataaaagtttatattaaattcacatcagtgtataatatttatacgtgaggtgatataagtgacaaaaagatttgagtttgatgatgatttagaggagttagatatagatgagccagaacaagatgaagcggtggaggagacgggaaataaaaagcaacgtcgtccaaaaactaagaaaaagaaagtaacaaaaacaaagcgaaaaacaaagactaaaactaaagtgaaaaaggaaaaacaaggacgttctaagttttcaacttttattttatcattattgatcttgcttattattaccggagcatgtgttggcggttattttgcttatgaatattacatagatcaacaaaagcagattgataatttgcaagagcagttagatgattccaagaaagaaaataattctactaagcaaaaagaaaataagaatgatactaaaaaaaaggataatcaacaaagcgatgatgctggtactgatgaacctccagttgaagataatacttcgaatggaaatacttctgatcaagaaggaacgaatgatacgaataatgaaactaccgaaatgcaatgaactgtgagcatatcggtggtttttttcttaacaaaggcaaacaagaaaagaaacaaaaaaattgcgaatttttttaaaaattacttgcaatcatattttattaatgttattatagacaagcagtagtcgttaggacctctgctaagaagacaatgcgggtgtagttcaatggtagaacttcagccttccaagctgactacgtgggttcgattcccatcacccgctcca
